United States Patent Application Publication US 2011/0195843 A1 - sequence listing, part 2

SEQ ID NO: 2862 - DNA, 762 bp, Physcomitrella patens subsp. patens
  CDS (1)..(762)
atgaatgcaattgtgcctgacggatttgcttctgaatcggatgcaggtaccaagcttacacaggatgaactcaagaagattgctgccgagaaggctgtggaatatgtcaagagtggcatggtcttgggtttgggcacaggttctacagctgcatttgcagtggcaaagattggcgagcttttgaaggaaggaaagctgacggatattgttggagtgcctacctcaaagagaacggcagaacaggctgcgtcactgggcatccctctatctgttttggatgatcatcctaagattgatctagctatcgatggagctgatgaagtcgatcccgatctcaaccttgtgaaaggacggggtggtgctttacttcgtgagaagatggtggaggctgcttcagcaaagtttgtagtgattgttgatgaaaccaagttagtgaagggccttggaggcagcaagctggccatgcctgtggaggttgtccagttttgctggaagtataatgccgagcgcttgaagaaccttccagaacttgctggttgcgaggttaaacttcgcatggatggcgacaagccctatgtgactgacaattcgaattacatcatcgacctttacttcgaggagcctattgtagacgccaacgctgcagctcaggctatctccgcattagaaggtgtggtggaccatgggcttttcttgaacatggccagcgctgttatcattgcaggttctgatggtgttactgtccaaactaaggacacttag

SEQ ID NO: 2863 - protein, 253 aa, Physcomitrella patens subsp. patens
MNAIVPDGFASESDAGTKLTQDELKKIAAEKAVEYVKSGMVLGLGTGSTAAFAVAKIGELLKEGKLTDIVGVPTSKRTAEQAASLGIPLSVLDDHPKIDLAIDGADEVDPDLNLVKGRGGALLREKMVEAASAKFVVIVDETKLVKGLGGSKLAMPVEVVQFCWKYNAERLKNLPELAGCEVKLRMDGDKPYVTDNSNYIIDLYFEEPIVDANAAAQAISALEGVVDHGLFLNMASAVIIAGSDGVTVQTKDT

SEQ ID NO: 2864 - DNA, 963 bp, Physcomitrella patens subsp. patens
  CDS (1)..(963)
atggcgtcgtcggccatgttggcaagtcaagcgcccactggagcgtcgggcgtagcggtggtctcggttccgcgcagttcggtgtcggggtcatcgtcatccactacgcagctttcggtcaagtcgttcggggcgtcgtcgacgttgctgtgcggcggggaagtagtgcagaagcaggccgggttcgggagcgtgccgaagaaatctaacgccatgacgttcgctcctcgtgcgcaatcgcaagctacccaggctcttactcaagatgagctgaagaaaatcgctgctgagaaggcagtggaatatgtcaagagtggcatggttttgggtttgggcacaggctccacagctgcatttgcagttgcgaagattggcgagcttttgaaggaaggaaagttgacggatatcgttggagtgcctacttcaaagagaacggcagaacaggctgcatctctgggtattcctctttctgttttggacgatcatcctaagattgatttggcgatcgatggagccgatgaagtggatcccgatctcaatcttgtgaaggggcgaggtggagctttacttcgtgaaaagatggtggagaaagcatcagcaaagtttgtagtcattgttgacgaaaccaagttggtgaagggacttggaggcagtggattggctatgcctgtggaagttgtccagttttgctggaagtacaacgctgaacgcctgaagaatcttccagaagttgctgggtgtgaggttgaactgcgtatggatggagacaagccgtatgtgactgacaactcgaactacatcatcgatctttatttccaggagcccattaaagatgccaatgctgcagctcacgcaatttctgcactagaaggtgtggtagatcatggtcttttcttgaacatggccagcgcagttatcattgcaggctctgatggagtaactgttcaaaccaaggatacatag

SEQ ID NO: 2865 - protein, 320 aa, Physcomitrella patens subsp. patens
MASSAMLASQAPTGASGVAVVSVPRSSVSGSSSSTTQLSVKSFGASSTLLCGGEVVQKQAGFGSVPKKSNAMTFAPRAQSQATQALTQDELKKIAAEKAVEYVKSGMVLGLGTGSTAAFAVAKIGELLKEGKLTDIVGVPTSKRTAEQAASLGIPLSVLDDHPKIDLAIDGADEVDPDLNLVKGRGGALLREKMVEKASAKFVVIVDETKLVKGLGGSGLAMPVEVVQFCWKYNAERLKNLPEVAGCEVELRMDGDKPYVTDNSNYIIDLYFQEPIKDANAAAHAISALEGVVDHGLFLNMASAVIIAGSDGVTVQTKDT

SEQ ID NO: 2866 - DNA, 951 bp, Physcomitrella patens subsp. patens
  CDS (1)..(951)
atgctccagaacattgcagttgcctcctctgcggcaacgagcgtagctcggttcaggagcatcgcggcggcaccttctagccagcgcgtcgctttgggtcagagccatcttggtagtgctaaggttttttttacccctgcacgaattggctcacgctcgagctcgcaccgtgctgccacgcaggtagtggctttgaaggacccctcttcacaagataatctgaagagagcagttgcgaagaaagctattgagctggtgaagtcgggaatggtggtagggctcggtactggtagcacatcctccatggctatcgaggagttgggcaacttgatccaggcgaacaagttaaaagacatcgtgggcgtggccactagttaccagtctaaggtgcttgcccgccagttcggagtgaagaccgtcgacttgaatgacgtgaaccacatcgacatcgcctttgatggagcggatgaggttgattcgggcatgagcttgatcaagggaggaggcgcggctcacaccatggagaaggtggtagactctattgcgaaggaatgcgtgattcttattgacgaaactaaagttgtcaagacgcttggtctttcattccccgttccagtcgaggttctgcctttcgcccttgcacctgttcttcgtgcattggctgctttgggaggacagcccgaaatccgcactgctcttcgaaaggatggcccagtcatcacggatctgggtaacatggtcgtcgatgtgagattccccgaaggcgtgaaggaccctgctgaaatggaaaccaagattaacatgatccctggagttattgacaatggtcttttcatcaacgttgcacacaaagtgttggtgggtacaaaagacggcgacgagacctcagttgtagaattcgccgagtttgtatccagcatgaagagttccacagagggagtctcagcttaa

SEQ ID NO: 2867 - protein, 316 aa, Physcomitrella patens subsp. patens
MLQNIAVASSAATSVARFRSIAAAPSSQRVALGQSHLGSAKVFFTPARIGSRSSSHRAATQVVALKDPSSQDNLKRAVAKKAIELVKSGMVVGLGTGSTSSMAIEELGNLIQANKLKDIVGVATSYQSKVLARQFGVKTVDLNDVNHIDIAFDGADEVDSGMSLIKGGGAAHTMEKVVDSIAKECVILIDETKVVKTLGLSFPVPVEVLPFALAPVLRALAALGGQPEIRTALRKDGPVITDLGNMVVDVRFPEGVKDPAEMETKINMIPGVIDNGLFINVAHKVLVGTKDGDETSVVEFAEFVSSMKSSTEGVSA

SEQ ID NO: 2868 - DNA, 888 bp, Coprinopsis cinerea okayama7#130
  CDS (1)..(888)
atgtcaccttcgaccacgtactcgaaatcctctgctaccactgctggacgcggttacctgaacggctcccccttgaaatcgaaatctttggcttccggcgttgatggcaaagcagcaggaggaatggagaccctttcgttgattgaagcttcgaaacgcctggcggcgtatactgctgttgaccagcatgtaaaacctgagcacaggatcattggtattggctcgggctcgactgttccgtatgtggtggataggattgtgcaacagggtgttgagcttaatgccggacgggtgttcattcctactggcttccaatcgagacaactcattgttgcagcagggttgacccttggcgatgtggaccaatacccaacaatcgatatcaccattgacggagctgatgaagtcgatcataatttgaactgtgtgaagggaggaggagcatgtcatttgagagagaaagtgttggctgaggctgctcatacgttcatcttggtggcggattacaggaagaacgtgcaatttttgggaacgaactatctctcgggtgtaccgatagaagtcgtcccgttcgcgtataacaaggtgttgcacaacctgcatcattcgcttggaagcccaaaggctgctctgcggatggccataaagaaagccggtcctgtcgtctcggacaacggcaacttcatcatcgacgcgcccttcacgcaggagcaactggcggatccgtacaccgttttggcacagattaagatgttgacgggtgtggtggaggtggggctgttctgcaagatggccaaggctgcgtactttgggaatgaggatgggagtgtgacggttaggtgggacgatgggagggtggaggttgttcctagtgctacgagtgcgtag

SEQ ID NO: 2869 - protein, 295 aa, Coprinopsis cinerea okayama7#130
MSPSTTYSKSSATTAGRGYLNGSPLKSKSLASGVDGKAAGGMETLSLIEASKRLAAYTAVDQHVKPEHRIIGIGSGSTVPYVVDRIVQQGVELNAGRVFIPTGFQSRQLIVAAGLTLGDVDQYPTIDITIDGADEVDHNLNCVKGGGACHLREKVLAEAAHTFILVADYRKNVQFLGTNYLSGVPIEVVPFAYNKVLHNLHHSLGSPKAALRMAIKKAGPVVSDNGNFIIDAPFTQEQLADPYTVLAQIKMLTGVVEVGLFCKMAKAAYFGNEDGSVTVRWDDGRVEVVPSATSA

SEQ ID NO: 2870 - DNA, 708 bp, Culex quinquefasciatus
  CDS (1)..(708)
atgtctctggagcaggccaagaagattgccgcgttcaaggcggtcgacgagtacgtccggaacgacacggtggtgggcgtcggaagtggttccaccgtggtgtacgccgtccagcggttggccgaacgggttaaggctgagggactgcggttggtgtgcattccgacgagcttccaggcgaggcagctgattattgacgccgggttggtgttgggagatctggagcagaacccgcgtattgactgtgcgattgacggggcggatgaggtggacgcggacatggtgctgatcaagggcggtggcggatgtttgctgcaggaaaagatcgtggcttcgtgcgccgcccagttgattgtgatcgcggattacacgaaggattccaagcgactaggcgagcagtacaaaaagggcatccccgttgaggtcgtcccgatggcgtacgtgcccatccgggatcgcatcgcggccaagtacggtggaaagttgcagctgcggatggccgttgccaaggccggtccggtcgttacggacaacggaaactttatcctcgactggcactttcccgacacgatcgtgaacggatgggacgaaatcaaccgggatataatgatgatcccgggggtggtggagacgggactgtttgtcaaaatggccaccaaagcgtactttggactggcggatggatcggtcatcgaacgaagtgcctaa

SEQ ID NO: 2871 - protein, 235 aa, Culex quinquefasciatus
MSLEQAKKIAAFKAVDEYVRNDTVVGVGSGSTVVYAVQRLAERVKAEGLRLVCIPTSFQARQLIIDAGLVLGDLEQNPRIDCAIDGADEVDADMVLIKGGGGCLLQEKIVASCAAQLIVIADYTKDSKRLGEQYKKGIPVEVVPMAYVPIRDRIAAKYGGKLQLRMAVAKAGPVVTDNGNFILDWHFPDTIVNGWDEINRDIMMIPGVVETGLFVKMATKAYFGLADGSVIERSA

SEQ ID NO: 2872 - DNA, 894 bp, Magnaporthe grisea 70-15
  CDS (1)..(894)
atggcaagctcagggtcggccgtgtcggcggtcgagcaggcgcagttgatagagatggccaagaaggccgccgccttcactgccgtcaaggaccacttggatcctcgctacacacacgtcggcatcgggtctggctccaccgtcgtctacgtcgtcgaggccatcaaggagctgcacccagaggcctcgaaggacatgaccttctacccgactggcgaccagtccaaaggcctcatcaaggccggcgggctccgggcggccccgatagaggaccgaccccagggcagcctgctggacgtctactttgacggcgccgacgaggccgacgccgacctcaacctgatcaagggcggcggcggctgcctgtggcaggagaagatcgtcgccgtggcctcgcgcacatttgtctgcatcggcgacttccgcaagctctcgaggaacctaggcacccaatggaagcaagggatcccaatcgaggttctccccaaggcggcagaccatgtgctggccgagctggagaggctcggcgcgcactcgccgcgactgagatccggctcaggaaaggccgggtccgtggtgacggacaatgggatgcacatcatcgatgcccccttcaccccgctgcttctggccggagatgagggtgggactggcgagaatggaatctggagcgtcgacaggctcgcggctaaactcaagtctctggtcggcgtctgcgagattggcctcttctacggccgtagcggcctggatgcaaaggatgagggcggtgcacagaagcccgtcgcggcctatttcggcatggctgacggcagcgtgcagattctcaaccagggctccccgcccgtcacccttacaacatcgagcacgggtggctctgatggttccaaatga

SEQ ID NO: 2873 - protein, 297 aa, Magnaporthe grisea 70-15
MASSGSAVSAVEQAQLIEMAKKAAAFTAVKDHLDPRYTHVGIGSGSTVVYVVEAIKELHPEASKDMTFYPTGDQSKGLIKAGGLRAAPIEDRPQGSLLDVYFDGADEADADLNLIKGGGGCLWQEKIVAVASRTFVCIGDFRKLSRNLGTQWKQGIPIEVLPKAADHVLAELERLGAHSPRLRSGSGKAGSVVTDNGMHIIDAPFTPLLLAGDEGGTGENGIWSVDRLAAKLKSLVGVCEIGLFYGRSGLDAKDEGGAQKPVAAYFGMADGSVQILNQGSPPVTLTTSSTGGSDGSK

SEQ ID NO: 2874 - DNA, 846 bp, Gibberella zeae PH-1
  CDS (1)..(846)
atgtcttcatcagcaaacctagttgagtcggccaaaaagttggccgcctatcaggcagtcaatgatcacctcgatgcctcttacaagtttgtcggaattggctctggtagcaccgttgtctacgttgtggacgccattgtcagcaagggacccgaattctacaagggaatgacttttattcctactggaagtcagtcaaagggtcttattcgtgctgctggcttgaatcttgtaaacttggatgagaggcctatggtggatggccttcctgttcctcttgacgttgcctttgatggcgctgacgaggtggacgaggacctcaatcttatcaagggcggcggtgcttgtttgttccaggagaaattggttgcaattgctgccaaaaagtttatcgctgtagctgattaccgaaagcaatctcccaaactatgtactacatggaagaccattcctatcgaggttcttcccttgtccgcacctgatgttctggtccgccttcgagccatggggtcccccaaacctgccattcgttcaggtctccctgccaaagctggcgaatgtgtaacagacaacggcatgtggcttattgacgcaccgttctctcccttgcttcttcccaaggatatcaactccgagaacaagggccgtggagaaaatggtgcctgggaggttaatgccctcgccgaggaactggtccgaacacctggtattgttgaaattggtttgtttcacggcttcaatggaaacgaagctgtcaagctgggcaaggagtcgcaagcgcagaagcccattgcggcctatttcggtctcgccaatggcgaggtgcaggtacaaaatgccgcttaa

SEQ ID NO: 2875 - protein, 281 aa, Gibberella zeae PH-1
MSSSANLVESAKKLAAYQAVNDHLDASYKFVGIGSGSTVVYVVDAIVSKGPEFYKGMTFIPTGSQSKGLIRAAGLNLVNLDERPMVDGLPVPLDVAFDGADEVDEDLNLIKGGGACLFQEKLVAIAAKKFIAVADYRKQSPKLCTTWKTIPIEVLPLSAPDVLVRLRAMGSPKPAIRSGLPAKAGECVTDNGMWLIDAPFSPLLLPKDINSENKGRGENGAWEVNALAEELVRTPGIVEIGLFHGFNGNEAVKLGKESQAQKPIAAYFGLANGEVQVQNAA

SEQ ID NO: 2876 - DNA, 714 bp, Apis mellifera
  CDS (1)..(714)
atgggagagttacttactctcgaaagtgctaaacaaattgcagcttacaaagcagttgacgaatatgtgaagaataacagtatcattggaattggtagtggatctacagtaatatatgctgttcacaggcttgttgaacgtgtaaaggaggaaaatcttaatgttatttgtgttccaacttcattccaagctcggcagttaatattaaataatcatcttaaattgggtgatttggagacctatcctaaattggattgtgcaattgatggagcagatgaagttgattctgacatgaatcttatcaaaggtggaggaggttgtttacttcaagaaaaaattgttgcatcctgtgctaatcaacttattatagtagcagattatacgaaaaattctcaaaaacttggtgaacaatataaaaagggtattcctattgaagtagttcctatggcatatgtcgctattttaagaagaattgaagataattatggaggacttgtgaaagttagaatggctttagctaaagctggtccagttataacagataatggtaattttatccttgattggcattttcctcgtgatataagtaattgggataaaatcaatatagaaatctcaatgataccaggagtagttgaaactggactttttataaaaatggcaaaaaaagtgtactttggaatgcctgatggtagtgttaaagaacaattttaa

SEQ ID NO: 2877 - protein, 237 aa, Apis mellifera
MGELLTLESAKQIAAYKAVDEYVKNNSIIGIGSGSTVIYAVHRLVERVKEENLNVICVPTSFQARQLILNNHLKLGDLETYPKLDCAIDGADEVDSDMNLIKGGGGCLLQEKIVASCANQLIIVADYTKNSQKLGEQYKKGIPIEVVPMAYVAILRRIEDNYGGLVKVRMALAKAGPVITDNGNFILDWHFPRDISNWDKINIEISMIPGVVETGLFIKMAKKVYFGMPDGSVKEQF

SEQ ID NO: 2878 - DNA, 822 bp, Aspergillus nidulans FGSC A4
  CDS (1)..(822)
atggccgagcttatcgagaaggctaaacgcgccgctggaaaggccgctgtcgaaaaccactaccccaaagatgccaaatttgtcggtattggcagtggttctactattgtgtatgttgttgaggccatcaaggagctgggaatcgatacctctggcacgtgttatgtgccaacgggcttccagtccaagcagctgatcgtctcggccggcctgacagcagtggatttcgatgccattcccgaaggaacagtgcttgatattgcgttcgacggtgcagacgaggtggatgatgagcttaaccttataaagggcggtggtgcttgtcttttccaggaaaaaattgttgctctccaagccaaggagttcatttgcgttgccgattcaagaaagttgcagtcccgcctcctgtctaactggaagtacattcccattgaggttgctccgatagctgctaagcgggtgctacctgctctgagacagctgggcagcatcaatcctgtacttcggccgcagactggatccaagctaggcccattgaaaactgaccaggacttttacatcatcgatgcacctttcccaactcttttaacaaaagcggacgttgcagctggaaaggacggtagcggaaaggatggcatttgggaggtcgacgctttgtcactggcgattaagcaaattcccggcgttttagatgttggtatcttctctggagtgaccgggcctcaggcccaggcgctcggcggcattggaggccagaagcccgttgcggcttactttgggatgcctgacggctcagtgcaggtcagaaaagcggacgcttga

SEQ ID NO: 2879 - protein, 273 aa, Aspergillus nidulans FGSC A4
MAELIEKAKRAAGKAAVENHYPKDAKFVGIGSGSTIVYVVEAIKELGIDTSGTCYVPTGFQSKQLIVSAGLTAVDFDAIPEGTVLDIAFDGADEVDDELNLIKGGGACLFQEKIVALQAKEFICVADSRKLQSRLLSNWKYIPIEVAPIAAKRVLPALRQLGSINPVLRPQTGSKLGPLKTDQDFYIIDAPFPTLLTKADVAAGKDGSGKDGIWEVDALSLAIKQIPGVLDVGIFSGVTGPQAQALGGIGGQKPVAAYFGMPDGSVQVRKADA

SEQ ID NO: 2880 - DNA, 702 bp, Tribolium castaneum
  CDS (1)..(702)
atggcatccctcgaaagtgctaaaaaactggcggcctacaaagctgtggacctccacgtgcaaaacaattccattgtgggtgtcggcagcggctccaccgttgtttacgccgttgagaggttagccgaacgtgtgaaaaacgaaaaattaaatgtacagtgtgtcccaacgtcctttcaagccaggcaattgatcatccagcacaggctgcacctaaccgacctagagatacatccaagattggatgtttgcattgatggtgccgatgaagttgattccaccttgacattgattaaaggaggtgggggatgcttattgcaggagaagattgttgctagctgcgccaaggagttaattattatagcggattataccaaaaattcacaaaagctgggggaacaatacaaaaaggggattccgattgaagttgttccgatggcctatctccccattaaaacgcaaattgaaaaccaactgggagggacagttgagctcagaatggctaaagccaaagctggacctgtggtcaccgataatgggaattttatcctggattggaaaaacttccaggattataaatgggacacaatcaacaccaaattgaatctcattccgggagttgtggagacgggactatttgttaacatggccaagaaggcctattttgggttggccgatgggtcagtcaaagaacaaatttaa

SEQ ID NO: 2881 - protein, 233 aa, Tribolium castaneum
MASLESAKKLAAYKAVDLHVQNNSIVGVGSGSTVVYAVERLAERVKNEKLNVQCVPTSFQARQLIIQHRLHLTDLEIHPRLDVCIDGADEVDSTLTLIKGGGGCLLQEKIVASCAKELIIIADYTKNSQKLGEQYKKGIPIEVVPMAYLPIKTQIENQLGGTVELRMAKAKAGPVVTDNGNFILDWKNFQDYKWDTINTKLNLIPGVVETGLFVNMAKKAYFGLADGSVKEQI

SEQ ID NO: 2882 - DNA, 696 bp, Prochlorococcus marinus str. AS9601
  CDS (1)..(696): transl_table=11
atgaaacaggtagttgctgatgcagcaataagggaagtaaagagtgacatgattcttggattaggttctggatctactgctgcgttaatgataaaaagccttgcggatgaaatgcgttctgggaaactccaaaatataagaggtgttgcaacttcttttcaatcagaagttttagcgcttgaattgaatatcccgcttatcgatttagcttctgtatctcaaattgatttagctattgatggagcagatgaagttgatccgggatttcaattaattaaaggaggaggagcatgccatgtcagagaaaaattagtagcatctaaatctgatcaattgttgattgttgttgatgaaactaaacttgtccaaaatttaaatctatcttttcctttacctgtagaagttcttccaaatgcttggaagcaagttcaggaagttatttcagaaatgaatggcagttcttctttaagaatggctaataaaaaagctggcccagttgttactgatcaaggcaacctagttctagatgttttatttaatgatggtattaagaatccaaaagacattgaaaaaactattaataatattccaggagttttagaaaatggattattcgtcgatcttacagacaaagttctagtgggtaaaattgaaaataatactccagtggtttactcaccctcaagagttagctaa

SEQ ID NO: 2883 - protein, 231 aa, Prochlorococcus marinus str. AS9601
MKQVVADAAIREVKSDMILGLGSGSTAALMIKSLADEMRSGKLQNIRGVATSFQSEVLALELNIPLIDLASVSQIDLAIDGADEVDPGFQLIKGGGACHVREKLVASKSDQLLIVVDETKLVQNLNLSFPLPVEVLPNAWKQVQEVISEMNGSSSLRMANKKAGPVVTDQGNLVLDVLFNDGIKNPKDIEKTINNIPGVLENGLFVDLTDKVLVGKIENNTPVVYSPSRVS

SEQ ID NO: 2884 - DNA, 696 bp, Prochlorococcus marinus str. MIT 9515
  CDS (1)..(696): transl_table=11
atgaaacaaatagttgctgatgcagctgttaaagaggtgaaagatggaatgatcgtaggtttagggtctggttcaactgcagcactcatgataaaaagccttgctgaacaaatcagattaggcaaattaaaaaatattaaaggagttccaacttcttttcagtctgaggttctttctctagaacttaagattccattaattgatttagcttcagtttcccaaattgatttagctattgatggggcagatgaagtggatcctgattttcagttaatcaagggaggtggagcctgccatgtccgagaaaaattggttgcatctaaagcaaataaattattaatagttgttgatgaaactaaattagtgcaacaattaaacttagtttttcctctacctgtagaggttctaccttctgcttggaagcaggtgaaggatataatttctgaaatgaatggagtttctgatttgaggatggcaacaaaaaaagcaggacctgttgtcacggatcaaggtaatttgattttggatgtcttatttaatactggtatcaaagatccaaaagatttagaaatgcgtattaataatattcctggagtattggaaaatggattgtttgttaatttaacagataaggttttggtgggtaagattgagaacaatgttccagtgttattttcaccttccaaggggagttaa

SEQ ID NO: 2885 - protein, 231 aa, Prochlorococcus marinus str. MIT 9515
MKQIVADAAVKEVKDGMIVGLGSGSTAALMIKSLAEQIRLGKLKNIKGVPTSFQSEVLSLELKIPLIDLASVSQIDLAIDGADEVDPDFQLIKGGGACHVREKLVASKANKLLIVVDETKLVQQLNLVFPLPVEVLPSAWKQVKDIISEMNGVSDLRMATKKAGPVVTDQGNLILDVLFNTGIKDPKDLEMRINNIPGVLENGLFVNLTDKVLVGKIENNVPVLFSPSKGS

SEQ ID NO: 2886 - DNA, 711 bp, Prochlorococcus marinus str. NATL1A
  CDS (1)..(711): transl_table=11
atggatctccaaaaccagatgaaaaaagcagttgctcaagctgctgtagatcaaattcaaaacggtatgattctaggccttggctctggttctacagcagctttgatgattgaagctcttgctataaaaataaaatcaggagaaattaaagatgttgttggagtgactacatcttttcagggtgaagttcttgcttctgaattaggcataccacttaaatctctttcatctgtttcagaaattgatcttgcaattgatggtgctgatgaagttgatcccaaatttcaattaatcaaaggaggaggagcttgccatgtgcaggaaaaacttgttgctgctttagctaaaaaatttatagttgttgttgactcaactaaacttgttgaaaaattgaaccttgatttcaaattacctgtagaggttcttccttctgcttggaaacaagtacaaaaaacattaataaatcttggaggagaagggaatctaaggatggctcagaaaaaggccggacctatagttactgatcagggaaacttgatactggatttaacctttaggaacggtattgatcaacctgaactattggaaactcaaatcaataatattccaggtgtccttgaaaatggactttttgtaaacctgactgatgaagtattggttgggaaagtagaaagtgatgttgtgggtgttgaatcacttaaaaagatttag

SEQ ID NO: 2887 - protein, 236 aa, Prochlorococcus marinus str. NATL1A
MDLQNQMKKAVAQAAVDQIQNGMILGLGSGSTAALMIEALAIKIKSGEIKDVVGVTTSFQGEVLASELGIPLKSLSSVSEIDLAIDGADEVDPKFQLIKGGGACHVQEKLVAALAKKFIVVVDSTKLVEKLNLDFKLPVEVLPSAWKQVQKTLINLGGEGNLRMAQKKAGPIVTDQGNLILDLTFRNGIDQPELLETQINNIPGVLENGLFVNLTDEVLVGKVESDVVGVESLKKI

SEQ ID NO: 2888 - DNA, 696 bp, Prochlorococcus marinus str. MIT 9301
  CDS (1)..(696): transl_table=11
atgaaacaagttgttgctgatgcagcaataagggaagtaaaaagtgacatgattcttggattaggttctggatctacagctgcgttaatgataaaaagccttgcggatgaaatgcgttctgggaaactccaaaatataaaaggtgttgcaacttcttttcaatcagaagttttagcgcttgaactgaatatcccccttatcgatttagcttctgtatctcaaattgatttagctattgatggagcagatgaagttgatccaggatttcaattaattaaaggaggaggagcatgccatgtgagagaaaagttagtagcatctaaagctgatcaattgctgattgttgttgatgaaactaaacttgtacaaaatttaaatctatctttccctttacctgtagaagttcttccaaatgcttggaagcaagttcaggaagttatctcagagatgaaaggtagttctactttaagaatggctactaaaaaagctggcccagttgttactgatcaaggcaatctaattcttgatgtattatttgatgatggcattaataatccgaaagacattgaaatgaagattaataatattccaggagtattagaaaatggattattcgttgatcttacagataaagtattagttggtaaaattgaaaacaatactccagtggtttactcaccatcaagagctagctaa

SEQ ID NO: 2889 - protein, 231 aa, Prochlorococcus marinus str. MIT 9301
MKQVVADAAIREVKSDMILGLGSGSTAALMIKSLADEMRSGKLQNIKGVATSFQSEVLALELNIPLIDLASVSQIDLAIDGADEVDPGFQLIKGGGACHVREKLVASKADQLLIVVDETKLVQNLNLSFPLPVEVLPNAWKQVQEVISEMKGSSTLRMATKKAGPVVTDQGNLILDVLFDDGINNPKDIEMKINNIPGVLENGLFVDLTDKVLVGKIENNTPVVYSPSRAS

SEQ ID NO: 2890 - DNA, 693 bp, Bradyrhizobium sp. ORS278
  CDS (1)..(693): transl_table=11
atggatgcattgaagcggcaggcggcggcgcgtgcgctggaagaagtcgagagcggcatgaagctcggcctcggcaccggctcgaccgccaagcatttcgtcgatctgctgggcgagaaggtgcgcgccggcctcaaggtggtgggcgttccgacctccgaggcgacgcgggcgcaggccgaagcttgcggcgtgccgctcaccacgctcgacgagatcgaccgtctcgatatcaccatcgacggcgccgacgagatcaatccggcgctcgacctgatcaagggcggcggcggcgcgctgttgcgcgagaagatcgtcgccagcgcctcgaatcgcatgatcgtgatcgccgacgacagcaaatgggtcgcgcggctcggccgcttcccgctgccgatcgaggtggtcccgttcgggatcgcggccacgcagcgcgagatcgccgacgccttcaccaaggctggcgtggctgggccgatgagcttgcgcaagtccgcagatggccacgttttcgtcaccgatggtggccactggattgtcgacgttcgcctgggggagatcgaggatcccccgcgcctggcgagctttttgagcgcaattccgggcgtggtcgagcacgggctgttcatcggcctcggcagcacggcgatcctggcaggcgcacagggaattcgcgttatccagcggccttga

SEQ ID NO: 2891 - protein, 230 aa, Bradyrhizobium sp. ORS278
MDALKRQAAARALEEVESGMKLGLGTGSTAKHFVDLLGEKVRAGLKVVGVPTSEATRAQAEACGVPLTTLDEIDRLDITIDGADEINPALDLIKGGGGALLREKIVASASNRMIVIADDSKWVARLGRFPLPIEVVPFGIAATQREIADAFTKAGVAGPMSLRKSADGHVFVTDGGHWIVDVRLGEIEDPPRLASFLSAIPGVVEHGLFIGLGSTAILAGAQGIRVIQRP

SEQ ID NO: 2892 - DNA, 762 bp, Xanthobacter autotrophicus Py2
  CDS (1)..(762): transl_table=11
atgccccacgccgcgccggttggccgcgcgaggggcaccggaacggaaactcccatggtgcacgccgaagatccgaagcgccgcgcggccgctcacgccctcacctacgtgaccgacggcatgcgcctcggcctcggcaccggctccaccgcccgccatttcgtggagctgttggccgagaaggtccatgccggcctcaacattctcggcgtgcccacctcagagcagactttgtcgcaggcggtctccctcggcgttccgatcgcgacgctcgacgaggccggtccgctcgacctgtgcatcgacggggcggacgaggtcggccccggccttgccctgatcaagggcggcggcggagcgctactgcgggagaagatcgtcgccagcgccgcgcgcgagatggtggtgatcgccgactcgagcaagaaggtggcgatgctcggccgcttcccgctgcccatcgaggtggtggatttcggcgtcgcctccatcgagcgccatgtggccgatgcggtgcgcaaggccggctgcgaaggcccggtgaagctgcgccgcgacggcgatggtcatcctttcgtcaccgatcagggccacctcatcctcgacgtccatctcggccgcatcccggacccggccgcgctcgcccgcgcggtggaggaagtcgccggcgtggtcgagcacgggctgttcctcggcctcgcccgccgggtcgtgctcgcgggcgcggacggcatcaccgtgctggagcccggcagcttctga

SEQ ID NO: 2893 - protein, 253 aa, Xanthobacter autotrophicus Py2
MPHAAPVGRARGTGTETPMVHAEDPKRRAAAHALTYVTDGMRLGLGTGSTARHFVELLAEKVHAGLNILGVPTSEQTLSQAVSLGVPIATLDEAGPLDLCIDGADEVGPGLALIKGGGGALLREKIVASAAREMVVIADSSKKVAMLGRFPLPIEVVDFGVASIERHVADAVRKAGCEGPVKLRRDGDGHPFVTDQGHLILDVHLGRIPDPAALARAVEEVAGVVEHGLFLGLARRVVLAGADGITVLEPGSF

SEQ ID NO: 2894 - DNA, 696 bp, Prochlorococcus marinus str. MIT 9215
  CDS (1)..(696): transl_table=11
atgaaaaaaatagttgcggatgcagcgataaaggaagttgagagtgacatgattcttggattaggatctggatctacagctgctcttatgataaaaagccttgcagatgaaatacgttctggaaaacttcaaaatataagaggtgttgcaacttcctttcaatcagaagtcttagcgctcgaacttgatatcccgcttatcgacttagcttcagtatcccaaatcgatttagctattgatggagcagatgaagttgatccgagatttcaattaataaaaggaggtggagcatgtcatgttagagaaaagttagtggcatctaaagctaatcgattattgattgttgttgacgaaactaaacttgttcaaaacttaaatcaaactttccctcttcctgtagaggtccttccaaatgcttggaaacaagtagaggaagtgatctcagagatgaaaggtagttctagtttaagaatggctactaaaaaagctggtccaattgttactgatcagggtaatttgattttagatgtgttttttgatggtggtattaagaatccaaaagatattgaattgagccttaataatattcctggcgtcttggaaaatggattatttgttgatcttacagataaagtattggttggtaagattgaaaataatattccagttgtttattctccttcaaaatttggctaa

SEQ ID NO: 2895 - protein, 231 aa, Prochlorococcus marinus str. MIT 9215
MKKIVADAAIKEVESDMILGLGSGSTAALMIKSLADEIRSGKLQNIRGVATSFQSEVLALELDIPLIDLASVSQIDLAIDGADEVDPRFQLIKGGGACHVREKLVASKANRLLIVVDETKLVQNLNQTFPLPVEVLPNAWKQVEEVISEMKGSSSLRMATKKAGPIVTDQGNLILDVFFDGGIKNPKDIELSLNNIPGVLENGLFVDLTDKVLVGKIENNIPVVYSPSKFG

SEQ ID NO: 2896 - DNA, 714 bp, Prochlorococcus marinus str. MIT 9211
  CDS (1)..(714): transl_table=11
atggaagatttgcaaactcaaatgaaagaggctgttgctaaagcagctattgagcaaattcacgatgggatggttctaggacttggctcaggatcaaccgctgccttaatgattaaagccttaggggcaaagatctcgtcaggtcatctcaaagatattgttggagtgacaacttcgtttcaaggagaagtccttgcaactgaacttggcattcctttacaaggtctatcagctgtctcgcaaattgatttagcaatagatggtgctgatgaagttgattctaattttcaattaattaaaggcggtggtgcttgccatgttcaagaaaaacttgttgcttctttggctgagcgttttgtagtggttgttgattccagtaaaattgttaagactctaaatctcacttttaaactgcctgtagaagttttgccttcagcttggcaattggtgaaaaataagattcacgaaattggcggagtaagtcagcttcgaatggcgcaaaagaaagccggtccaattgtcacagatcaggggaatttggttttagatgtaacttttgcaggtggtataaacgaccctcaaacccttgaaaagcaaatcaataatatacctggtgtccttgaaaatggcttattcgttaatcttgcagatgaggtattagttggagaaattgtatctggaaccccaggtgttaaatctcttcagaagatttag

SEQ ID NO: 2897 - protein, 237 aa, Prochlorococcus marinus str. MIT 9211
MEDLQTQMKEAVAKAAIEQIHDGMVLGLGSGSTAALMIKALGAKISSGHLKDIVGVTTSFQGEVLATELGIPLQGLSAVSQIDLAIDGADEVDSNFQLIKGGGACHVQEKLVASLAERFVVVVDSSKIVKTLNLTFKLPVEVLPSAWQLVKNKIHEIGGVSQLRMAQKKAGPIVTDQGNLVLDVTFAGGINDPQTLEKQINNIPGVLENGLFVNLADEVLVGEIVSGTPGVKSLQKI

SEQ ID NO: 2898 - DNA, 702 bp, Synechococcus sp. PCC 7002
  CDS (1)..(702): transl_table=11
atggatgccgtcacggtcatgaaacaagaagtgggcaaagtcgccgccgccctagtccagtccaactcagtggttggtttaggcactgggtcaaccaccgcctatgcaattcaatacatcggtgagcgtttagccgcaggtgaactagagaatattgtcgggattcccacctccttccaggcagaagttctcgcaaaacagtacaaaattcccctaagcagtttggatgccgttgatcatattgatgtggccattgatggggccgatgaggtcgatccccagaaaaatttaattaaagggggcggtgcggcccacacccgggaaaaagttgtggatgccctcgccaacaaattcgtcgtcgtggtagatagcggcaagctggttgatcgcttgggttcaacctttttattacccgtggaagtgattcccatggccattacgccagtgatgcgtcaactagaagcattgggtggtaagccagaactccgaatgggagtcaaaaaagctggccccgtggtgaccgatgaaggaaatttagtcgtggatcttaaatttgctggcatcgacgacccggcaaccctagagcaaaagattaataatatccctggcgtcctggaaaacggtctgtttgtcggggtggctgatgtgattttggtcggcgaaattattgacggacaaccccgcgtccgggaaattcagtag

SEQ ID NO: 2899 - protein, 233 aa, Synechococcus sp. PCC 7002
MDAVTVMKQEVGKVAAALVQSNSVVGLGTGSTTAYAIQYIGERLAAGELENIVGIPTSFQAEVLAKQYKIPLSSLDAVDHIDVAIDGADEVDPQKNLIKGGGAAHTREKVVDALANKFVVVVDSGKLVDRLGSTFLLPVEVIPMAITPVMRQLEALGGKPELRMGVKKAGPVVTDEGNLVVDLKFAGIDDPATLEQKINNIPGVLENGLFVGVADVILVGEIIDGQPRVREIQ

SEQ ID NO: 2900 - DNA, 702 bp, Cyanothece sp. ATCC 51142
  CDS (1)..(702): transl_table=11
atgtcagatccgattgtgatgatgaaacaagaggtgggtaaagcagcagcagcccgtgttaaatcagattcgattgtgggtttaggaacagggtcaaccactgcctacgccatacaatatattggtgaacggttacaatcgggagaattaaagaatattgtcggcgttactacttcgtttcaagcagaggtcttggcgagaaagtataatatccccttaagcactctagatgtggttgatcgcattgacatcgccattgatggggctgatgaggttgatcctcaaaagaacttaatcaaaggtggcggtgcagcccatacccaagaaaaaattgttgatagtttagcagaacagtttattgtagtggttgatggcggtaaactggtggataagttggggtcaacttttttattacctgttgaggtaattcctaaagccgttgttcctgtgatgcgtaaattggagcaattgggaggcaaaccagaattacgaatgggagtcaaaaaggcaggtcctgtggtaacagaccaaggtaatttggttattgatgtgaagttcgacagtattgatgatcctgcaaccctggaaaaaaccattaataatatccctggtgtactagaaaatggcttattcgttggggttactgatgtggtgttagtgggtgaaattattgataataaacctgttgtccgagaaatttaa

SEQ ID NO: 2901 - protein, 233 aa, Cyanothece sp. ATCC 51142
MSDPIVMMKQEVGKAAAARVKSDSIVGLGTGSTTAYAIQYIGERLQSGELKNIVGVTTSFQAEVLARKYNIPLSTLDVVDRIDIAIDGADEVDPQKNLIKGGGAAHTQEKIVDSLAEQFIVVVDGGKLVDKLGSTFLLPVEVIPKAVVPVMRKLEQLGGKPELRMGVKKAGPVVTDQGNLVIDVKFDSIDDPATLEKTINNIPGVLENGLFVGVTDVVLVGEIIDNKPVVREI

SEQ ID NO: 2902 - DNA, 708 bp, Nostoc punctiforme PCC 73102
  CDS (1)..(708): transl_table=11
atgacaggaacagatcccgtaaagttgatgaagcaagaagttggcaaagccgctgccgccctagtaaaatcgggttctatcgtcgggttgggtacggggtcaactacagcatatacgattcagtttttaggcgatcgcctcaagtctggtgaactcaaagatatcattggcatacctacctcgtttcaatcagaagtgctggcgaaacagtatggtgtccctcttgctaccttggattctattgaccacatcgatattgccattgatggggcagatgaagttgatccgcagaagaatttgattaaaggcggtggtgcagcacatacccgcgagaaagtcgtagactacctggcagaacagtttatcgtcgtggtagatagtggtaaattagtagatcgcttgggttctagttttgctgtacccgtggaagtgattccaatggcaattactcctgtaaccaatgccattaaaaaactcggtgggaaacccgaactccgcatgggtgtcaaaaaagctggcccagtgatcactgaccaaggtaactttgtcttagatgtcagatttgactctattgaagatccagtcagcctagaaaaaacattgaataacattcccggtgttctggagaatggtatttttgttaactgtgtcgatttagttttgattggtgaagtcaaagatggtcagccattagtgcggcaactgtaa

SEQ ID NO: 2903 - protein, 235 aa, Nostoc punctiforme PCC 73102
MTGTDPVKLMKQEVGKAAAALVKSGSIVGLGTGSTTAYTIQFLGDRLKSGELKDIIGIPTSFQSEVLAKQYGVPLATLDSIDHIDIAIDGADEVDPQKNLIKGGGAAHTREKVVDYLAEQFIVVVDSGKLVDRLGSSFAVPVEVIPMAITPVTNAIKKLGGKPELRMGVKKAGPVITDQGNFVLDVRFDSIEDPVSLEKTLNNIPGVLENGIFVNCVDLVLIGEVKDGQPLVRQL

SEQ ID NO: 2904 - DNA, 687 bp, Borrelia garinii PBi
  CDS (1)..(687): transl_table=11
atggaaaatcaaaaaatgttggtagcaaaatacgcaattgatcgctacatcaaaagcaatatgaaccttggggttggaacaggtacaactatttattatgcaataaaatatttaagcgaaaagataaaatcgggcaacctaaaaaatttaaaactctatgcaacaagtagcgatacaaaatatttactatcaaaagaacaaattccttgtgaatcaaatttttcaaaacttaataaaaatctagacattgcaattgatggagctgatgaaattctattagaaaaaaaaagcttaataaaaggaatgggaggcgcacatctaatggagaaagtaatagcttacaattcagaaacattgctaataatagcagatgaaacaaaaattgtaaaaaaattgggaacaaaaatgtctattcccatagaagttgcccaaaatgcagttggatttattatgaccaggcttgaagaaatgaatttagacacaaccttaagagtttgtaaggaaaaaaaaggacctattataactgacaataataattatattttagatgtaaaaatgcacgtagaaaatcccgaaggaacagaaaaatacttcaaactatttccaggtatacttgagattggaatattcaatcataaaaacacaaaaatagtttattaccaaaacaaacaaatcaaggaagcctaa

SEQ ID NO: 2905 - protein, 228 aa, Borrelia garinii PBi
MENQKMLVAKYAIDRYIKSNMNLGVGTGTTIYYAIKYLSEKIKSGNLKNLKLYATSSDTKYLLSKEQIPCESNFSKLNKNLDIAIDGADEILLEKKSLIKGMGGAHLMEKVIAYNSETLLIIADETKIVKKLGTKMSIPIEVAQNAVGFIMTRLEEMNLDTTLRVCKEKKGPIITDNNNYILDVKMHVENPEGTEKYFKLFPGILEIGIFNHKNTKIVYYQNKQIKEA

SEQ ID NO: 2906 - DNA, 726 bp, Synechococcus elongatus PCC 6301
  CDS (1)..(726): transl_table=11
atgttgttgaacacccgcaagcctgttatggatccagtcacccacatgaaacatgaagtcgcgaaagcagccgcgagtcgggtgcaatctggcatggtggtcgggctgggctcgggctctacagcagccctcatgattcagtacttgggcgatcgcgttcgcaatggcgaactcaccaatattcaggctgtacccacctcttttcagtcctcagtattggcgaatgaatacggcattccgctgacgaccctgaacgaagtcgatcgcattgatattgcaattgatggcgcggatgaagttgatccacaacgcaacctgatcaaaggcggtggcgcttgccatacccgcgagaaactagtggatgcgcgggctgagcaattcattgtcgtcgttgacagcagcaaactggtagaggcactcggaacaaccttcttactgcccgtggaagtgctgccggaagcttacattcaagtcggcaaagccttggaaaaattgggtggcaaaccagaactgcggatggcggtcaaaaaagcaggcccagtcgtgactgaccaaggcaacctcgttctcgatgtgaaattcgatcgcattgaccagcccgcagaactggagaaagcgattaacaacattccaggcgtgctggaaaacggtctgtttgttggcttgaccgatcttgtactcgttggtgaagttgacggcgatcgcgtttctgtgcgcgagttctag

SEQ ID NO: 2907 - protein, 241 aa, Synechococcus elongatus PCC 6301
MLLNTRKPVMDPVTHMKHEVAKAAASRVQSGMVVGLGSGSTAALMIQYLGDRVRNGELTNIQAVPTSFQSSVLANEYGIPLTTLNEVDRIDIAIDGADEVDPQRNLIKGGGACHTREKLVDARAEQFIVVVDSSKLVEALGTTFLLPVEVLPEAYIQVGKALEKLGGKPELRMAVKKAGPVVTDQGNLVLDVKFDRIDQPAELEKAINNIPGVLENGLFVGLTDLVLVGEVDGDRVSVREF

SEQ ID NO: 2908 - DNA, 660 bp, Psychrobacter arcticus 273-4
  CDS (1)..(660): transl_table=11
atgagtgatcagcaagcacaaaagcaagccgcagccaaagccgctctacgctatattgaagatgatatgatacttggcgtggggacgggcagtacggtgaactgtctgattgagttattaccgacattaaagcttgctggcgcggttgcaagctcgcaggtgacagaagatagattgcgtgcacttggtatcgagattgttgatttaaactttgcaggtcagcttgatgtgtatattgatggtgctgacgaagtaaacgcgcatttgcaactgattaaaggtggcggcggtgcgctgacacgcgaaaaaatcgtcgccgcagcttccaataagtttgtctgcatggtcgatgagagtaaaagtgttgagatactggggcgcgctttcccagtaccaatagaggtattgccccaagcacgttcttatgtggcgcggcaattagcccgtatgggcggcgagccggtttatcgtgaagattttgtcacggattatggcaatgtgattttggatacttacgatttggatgtcagtaatccactagcacttgaacagcagttaaacaatatcgtcggtgtggtttgtaatggtatctttgctgccaatcaagcagacgttttgctcaaagcaagcagtaacggggttgaaatacttaaccgttaa

SEQ ID NO: 2909 - protein, 219 aa, Psychrobacter arcticus 273-4
MSDQQAQKQAAAKAALRYIEDDMILGVGTGSTVNCLIELLPTLKLAGAVASSQVTEDRLRALGIEIVDLNFAGQLDVYIDGADEVNAHLQLIKGGGGALTREKIVAAASNKFVCMVDESKSVEILGRAFPVPIEVLPQARSYVARQLARMGGEPVYREDFVTDYGNVILDTYDLDVSNPLALEQQLNNIVGVVCNGIFAANQADVLLKASSNGVEILNR

SEQ ID NO: 2910 - DNA, 699 bp, Dechloromonas aromatica RCB
  CDS (1)..(699): transl_table=11
atgcgcagcaaaccattcaggagcatcaccatgacccaggacgaactcaagcaggccgttgcccaggccgccgccgattacgtggcgcagaccgccccggccggcagcattatcggcgttggcaccggctcgacggccaatttcttcatcgatgcgctggcgccgctcaaggacaagtacaagggcgccgtcgccagttcggaagcgacccgcaagcgcctcgaaggccatggcatcgcagtctacgacctcaatgatgttgaagatattcccgtctatgttgatggcgctgacgaaatcgacgccggcctgaacatgatcaagggtggtggcggtgcgctgactcgcgaaaagatcgtcgcggccgtggctcgtgagttcgtctgcatctgtgacggctccaagctggtcgacaccatgggcaagtttccactgccggttgaggtcatcccgatggcccgcgcccatgttgcccgcgaactggccaagctgggtggtacgccggtgctgcgcgagggttttgtgaccgataacggcaatatcattctcgacgtcaaaggcctgtcgattaccgacccgaaggggctggaagcgcaaatcaaccagatcaccggcgtcgtcaccaatgggctgtttgccgttcgcccggccaacctgttgctgctcggcacggctgacggcgtcaggaccattcgctga

SEQ ID NO: 2911 - protein, 232 aa, Dechloromonas aromatica RCB
MRSKPFRSITMTQDELKQAVAQAAADYVAQTAPAGSIIGVGTGSTANFFIDALAPLKDKYKGAVASSEATRKRLEGHGIAVYDLNDVEDIPVYVDGADEIDAGLNMIKGGGGALTREKIVAAVAREFVCICDGSKLVDTMGKFPLPVEVIPMARAHVARELAKLGGTPVLREGFVTDNGNIILDVKGLSITDPKGLEAQINQITGVVTNGLFAVRPANLLLLGTADGVRTIR

SEQ ID NO: 2912 - DNA, 711 bp, Prochlorococcus marinus str. NATL2A
  CDS (1)..(711): transl_table=11
atggatctccaaaaccagatgaaaaaagcagttgctcaagctgctgtagatcaaattcaaaacggtatgattctaggccttggctctggttctacagcagctttgatgattgaagctcttgctataaaaataaaatcaggagaaattaaagatgttgttggagtgactacatcttttcagggtgaagttcttgcttctgaattaggcataccacttaaatctctttcatctgtttcagaaattgatcttgcaattgatggtgctgatgaagttaatcccaaatttcaattaatcaaaggaggaggagcttgtcatgtgcaggaaaaacttgttgctgctttagctaaaaaatttatagttgttgttgactcaactaaacttgttgaaaaattgaaccttgatttcaaattacctgtagaggttcttccttctgcttggaaacaagtacaaaaaacattaataaatcttggaggagaagggaatctaaggatggctcagaaaaaggctggacctatagttactgatcagggaaacttgatactggatttaacctttaggaacggtattgataaacctgaactattggaaagtcaaattaataatattcccggtgtccttgaaaatggactttttgtaaacctgactgatgaagtattggttgggaaagtagaaagtgatgttgttggtgttgaatcacttaaaaagatttag

SEQ ID NO: 2913 - protein, 236 aa, Prochlorococcus marinus str. NATL2A
MDLQNQMKKAVAQAAVDQIQNGMILGLGSGSTAALMIEALAIKIKSGEIKDVVGVTTSFQGEVLASELGIPLKSLSSVSEIDLAIDGADEVNPKFQLIKGGGACHVQEKLVAALAKKFIVVVDSTKLVEKLNLDFKLPVEVLPSAWKQVQKTLINLGGEGNLRMAQKKAGPIVTDQGNLILDLTFRNGIDKPELLESQINNIPGVLENGLFVNLTDEVLVGKVESDVVGVESLKKI

SEQ ID NO: 2914 - DNA, 699 bp, Methanosarcina barkeri str. Fusaro
  CDS (1)..(699): transl_table=11
atgacagaaagaaatatatctaccgattccccggaaaaacgtgcggctggcatcgctgcatctcggatggtagaatcgggaatggttgtgggacttggaacgggctcaacagttgcatatacgataaaagaactcggcaggcgggtcagggacgaaggtctcgaaattctgggtgttgttacctcataccagtctgaaacgcttgccatcgaagccggcatccctctgaccacccttgcccagcattcggaactggacatcgccattgatggagcagaccaggtcgattcgaagctgcacgcaatcaaaggtgggggagctgcccatacaagggaaaagatagtatcggcgtctgcaagacgttttctggtcgtagctgacgaatcaaaaacgagcacccagcttgataaacctataccggttgaggttcttccctttgcaaaaactcttgtgattaaaaaaataaagcaattgggaggaaagcctgagccgaggttagctctgagaaaagacggccctgtgataactgataatggaaactttgtacttgatgcaaatttcggcgtaataaacgatccagaaggtctggcccttcaactatcttcaattcctggagttgttgagcatggaatattttccaatgtggacgaactctatatcgggaaaaaagatggatcagtggagatagtcaagaagtga

SEQ ID NO: 2915 - protein, 232 aa, Methanosarcina barkeri str. Fusaro
MTERNISTDSPEKRAAGIAASRMVESGMVVGLGTGSTVAYTIKELGRRVRDEGLEILGVVTSYQSETLAIEAGIPLTTLAQHSELDIAIDGADQVDSKLHAIKGGGAAHTREKIVSASARRFLVVADESKTSTQLDKPIPVEVLPFAKTLVIKKIKQLGGKPEPRLALRKDGPVITDNGNFVLDANFGVINDPEGLALQLSSIPGVVEHGIFSNVDELYIGKKDGSVEIVKK

SEQ ID NO: 2916 - DNA, 708 bp, Burkholderia thailandensis E264
  CDS (1)..(708): transl_table=11
ttgacgcttctcatgacccaagacgaactcaaacgcctcgtcggcgaggccgccgcccgatacgtgaccgacaacgtgccgcaaggcgcggtgatcggcgtcggcacgggctcgaccgccaactgcttcatcgacgcgctcgcggccgtcaaggatcgctatcgcggcgcggtgtcgagttcggtggcgacgaccgagcgcctgaagtcgcacggcatccgggtgttcgatctgaacgagatcgaatcgctgcaggtgtatgtcgacggcgccgacgagatcgacgaaagcggcgcgatgatcaagggcggcggcggcgcgcttacgcgcgagaagatcgtcgcttcggtcgcggaaacgttcgtctgcatcgccgatgcgagcaagcgcgtcgcgatgctcggccagtttccgctgcccgtcgaggtcgtgccgatggcgcgcaccgcgatcggccgccggcttgccgcgctgggcggcgtgcccgtgctgcgcgtgaagcaggacggcacgccgtacgtgaccgacaacggcaacgagattctcgacgtgaagggcttgcggatcgacgatccgcgcgcgctcgaagcggcgatcaacggctggcccggcgtcgtgacggtcggcctgttcgcgcaacgcggcgcggatctctgcctgctcggcaccgagcacggcgtcgagacgctccgttacgcggcacgttaa

SEQ ID NO: 2917 - protein, 235 aa, Burkholderia thailandensis E264
MTLLMTQDELKRLVGEAAARYVTDNVPQGAVIGVGTGSTANCFIDALAAVKDRYRGAVSSSVATTERLKSHGIRVFDLNEIESLQVYVDGADEIDESGAMIKGGGGALTREKIVASVAETFVCIADASKRVAMLGQFPLPVEVVPMARTAIGRRLAALGGVPVLRVKQDGTPYVTDNGNEILDVKGLRIDDPRALEAAINGWPGVVTVGLFAQRGADLCLLGTEHGVETLRYAAR

SEQ ID NO: 2918 - DNA, 660 bp, Methylobacillus flagellatus KT
  CDS (1)..(660): transl_table=11
atggctacacaagacgaattgaagcaacaggtcgccaaggcggccattgagtatgtaaagggcggcatcatcggtgtgggaacgggctccacagccaatttcttcattgatgagcttgccaaggtcaaagatcgcatcgatggtgctgtcgccagttccgaagcaacggcgcaacgcctacgcggccatggtatcaaagtattcgacctcaatgatgttgacggcatggaaatctatgtggatggtgcagatgagatcaccgagaagctgcatatgctcaagggcggcggcggagcattgacccgtgaaaagatcgtagcggcctgtgccaaggatttcatctgcatctgcgaccagaccaagctggtgccggtgcttggtaagttcccgctgcccgtagaggtcattccgatggcacgcgaatatgttgcgcgcgagttggtcaaattgggcggccagcccaagttgcgtgacttcaccactgacaacggtaacgtgatcctggatgtgcacggcctgaccattacggatccggtggcgctcgagtccaggatcaatgaaatcgtcggcgtggtgaccaacggcctgttcgcttcccgtccagccaatgtcctgctgctggcaaccgccgacggtgtcaagacattgacggccaggtag

SEQ ID NO: 2919 - protein, 219 aa, Methylobacillus flagellatus KT
MATQDELKQQVAKAAIEYVKGGIIGVGTGSTANFFIDELAKVKDRIDGAVASSEATAQRLRGHGIKVFDLNDVDGMEIYVDGADEITEKLHMLKGGGGALTREKIVAACAKDFICICDQTKLVPVLGKFPLPVEVIPMAREYVARELVKLGGQPKLRDFTTDNGNVILDVHGLTITDPVALESRINEIVGVVTNGLFASRPANVLLLATADGVKTLTAR

SEQ ID NO: 2920 - DNA, 693 bp, Methylobacillus flagellatus KT
  CDS (1)..(693): transl_table=11
atgaacgacaagcaactcgtcgccatacaggcggcacagcacgtgcaggacggcatggtggttggcctgggcaccggctcgaccgccaattacttcatcgaggaactggcccggcgccaccgcgacgaaggtctgcatatcaccgcagccgcgagctccgtagccagcaccatccaggcgcagactcatggcttgccgttggtggcgctcgagcatcttggtaggctcgacctctacgtggatggcgccgatgaggtcaccaccaacctagccctgctcaaggggcgcggctacgacctcgtgcgcgaaaagctgctggcccgcgccagcgagcgcttcatcgtgctggtcgacaaaagcaagctggtgggccacctgggcgaaaaattccccatcccgctagaagtcatcccgttcgcatggcaactggtccaggcctcattacaacaactgggcatcgcaagcagcctgcggcaaaatgccgccaaggatggctgggccatcacctcccacggcagcctggtactggagctcacgctgccgaaaaccttcaagagcgatgagctcaaccggctgctgaacgacatcccgggcattgtcgagcatggcgtgttcgacgagcttgccgatgccgtattcgtggccgacaacggccaggtggaagaaatctggaagaggcctggaaatatttaa

SEQ ID NO: 2921 - protein, 230 aa, Methylobacillus flagellatus KT
MNDKQLVAIQAAQHVQDGMVVGLGTGSTANYFIEELARRHRDEGLHITAAASSVASTIQAQTHGLPLVALEHLGRLDLYVDGADEVTTNLALLKGRGYDLVREKLLARASERFIVLVDKSKLVGHLGEKFPIPLEVIPFAWQLVQASLQQLGIASSLRQNAAKDGWAITSHGSLVLELTLPKTFKSDELNRLLNDIPGIVEHGVFDELADAVFVADNGQVEEIWKRPGNI

SEQ ID NO: 2922 - DNA, 696 bp, Methanococcoides burtonii DSM 6242
  CDS (1)..(696): transl_table=11
atgaaagaaagaaatgcaaatgcatcaagctctgaaaaagaagctgcaggcaatgccgctgccagtcttgtggaagatggtatgataatcggtcttggtaccggttcaacaacggctttcgcaattgcagaagttggcagacgtgtacgtgaagaaggattgaatgtattagctgttgtcacctcatatcaggctgaaatgcttgccattgaagctggagtgccactgacaagccttgcagagcatccggttcttgatcttgcgatagatggtgctgaccaggtggatgcaaaactgaacgtcatcaaaggcggaggagctgcacatacacatgaaaaggttgttgcccattcagcaaaacgcttcattgtagtcgtagatgaatcaaagataagcgaagaacttgatcacttcgtaccaattgaagtgcttccatatgcaagggaacttgcaaagaaacaattcatcgaacttggtggtaaaccacagatacgcctggcttcccgcaaggatggtcctgtgatctccgataacggtaatgtcatcattgatgtcgaattcggtgtgatcgaagatgctgctgagctctcacaaaagctttccacttgcgtgggtgttgtagaacatggtatcttcctgaataccgacgaggtctatgttggtatgaaagacggttcagttaagataattaactga

SEQ ID NO: 2923 - protein, 231 aa, Methanococcoides burtonii DSM 6242
MKERNANASSSEKEAAGNAAASLVEDGMIIGLGTGSTTAFAIAEVGRRVREEGLNVLAVVTSYQAEMLAIEAGVPLTSLAEHPVLDLAIDGADQVDAKLNVIKGGGAAHTHEKVVAHSAKRFIVVVDESKISEELDHFVPIEVLPYARELAKKQFIELGGKPQIRLASRKDGPVISDNGNVIIDVEFGVIEDAAELSQKLSTCVGVVEHGIFLNTDEVYVGMKDGSVKIIN

SEQ ID NO: 2924 - DNA, 687 bp, Ralstonia metallidurans CH34
  CDS (1)..(687): transl_table=11
atgactcaggatgaactcaaggcgctggtcgcgcaagctgccgctgactatgtgaagcaggaagtgcccgaaggcgccgttctcggcgtgggcaccggctccaccgccaatctcttcatcgacgccgtggcggcgttcaaggagcgcttttcgggcgcggtgtcgagttccgaggcctccacacgccgcttgcaacagcacggtttcaatgtgctcgatctgaacgaggtcgacagcattcccgtctatgtcgacggtgctgacgagatcgacaactcgggcgcgatgatcaagggcggcggcggtgcgctgacgcgcgagaagatcgttgcctcggtggcggaccgattcgtctgcattgccgacggcagcaagctggtgccgacgatgggcgcgtttccgctgccggtcgaggtgatcccgatggcacgcgcagcggtggcccgtagcctggcggcactaggcggtcagccgcgtctgcgcatgaccaaggaaggcggcatctacaagaccgacaacggcaacgtcattctggatgtctcgggcctgaagatcgagaacccgaaggcgctggagcagcaaatcaaccagctacccggcgtggtgaccgttggtctgttcgctctgcgcggagcaaatgtgctgttgctgggtaccgaacagggcgtgcagcgctcggattactga

SEQ ID NO: 2925 - protein, 228 aa, Ralstonia metallidurans CH34
MTQDELKALVAQAAADYVKQEVPEGAVLGVGTGSTANLFIDAVAAFKERFSGAVSSSEASTRRLQQHGFNVLDLNEVDSIPVYVDGADEIDNSGAMIKGGGGALTREKIVASVADRFVCIADGSKLVPTMGAFPLPVEVIPMARAAVARSLAALGGQPRLRMTKEGGIYKTDNGNVILDVSGLKIENPKALEQQINQLPGVVTVGLFALRGANVLLLGTEQGVQRSDY

SEQ ID NO: 2926 - DNA, 711 bp, Myxococcus xanthus DK 1622
  CDS (1)..(711): transl_table=11
atgagccagcagggcgacggcgcggcgacggcccgctacaaacaagcggccgccgaatgggcggtggacggcttcctccagccgggcatggtggtgggcctgggcacgggcagcaccgcggccttcgccgtccagcggctggccgcgctgcgcgcgcagggacggcttctggacatcgtgggcgtgcccacctcgcgcgccacggaggcgctggctcgctcgctgggcgtgcccgtgtcgacgttggacgcgcaccccgtgctggacgtcaccctcgacggcgcggacgaagtggcgccggacctgtcgctcatcaagggcggaggtggcgcgctgctgcgcgagaagatcgtcgcgcaagcaagccggcgcgtcgtcatcgtggtggacgcgggaaagctctcccccgtgctgggcacgcactggccggtgccggtggaggtgatgtccttcggttggcgctcccaggcgcggttcctcgaatcgcttggcgcgcgcgtcaccgtccggcagggcgctggcggcgagcccttcctcacggaccagggcaacctcgtgctcgactgcgccttcggccccatcgacgcgcccgcggcgctggccgcgagcctgggcgcgcgcgcgggaatcatgggccacggcttgttcctgaacctcgccacggacctggtggtggcggggccggagggcgtggagcaccgcgcgcgctga

SEQ ID NO: 2927 - protein, 236 aa, Myxococcus xanthus DK 1622
MSQQGDGAATARYKQAAAEWAVDGFLQPGMVVGLGTGSTAAFAVQRLAALRAQGRLLDIVGVPTSRATEALARSLGVPVSTLDAHPVLDVTLDGADEVAPDLSLIKGGGGALLREKIVAQASRRVVIVVDAGKLSPVLGTHWPVPVEVMSFGWRSQARFLESLGARVTVRQGAGGEPFLTDQGNLVLDCAFGPIDAPAALAASLGARAGIMGHGLFLNLATDLVVAGPEGVEHRAR

SEQ ID NO: 2928 - DNA, 696 bp, Rubrobacter xylanophilus DSM 9941
  CDS (1)..(696): transl_table=11
gtgagcccggacgggatggagcggctcaagcgggccgccgcccgggaggcggtggaccgctacgtggagagcgggatggtggtggggctcgggaccgggacgaccgcctcctgggcggtccgcaggatcggggagcggctgctggaggggagcctgagcggggtgcggggggtgcccacctcggagtacacggcggcgctggcccgggagtgcggggtgccgctggtctccctctcggagcgccgcccggagctgaccatcgacggggcggacgagatcgccccggacctcagcgtgataaagggccggggcggggcgctgctgcgggagaagatcgtggcggccgcctcgcggcggggcgtggtgatcgtggcggacggctccaagcaggtgtcgctgctgggcaacgggccgctgccggtggaggtggagcccttcgggtgggaggccaccgcggaggcgctggccgcgctggggtgcgagccggagctgcgccgggtcaagacccagccgttcgtcacggacggcgggcactacacgctggactgccgctttccgggcatcccggacccccccgggctggcctgcaagataaagcgggtgcccggggcgctggagtgcgggctcttcgtggggctggcgcgggccgcggtgatcgcgcgcccggagggggtggaggtgctggaggccgcctag

SEQ ID NO: 2929 - protein, 231 aa, Rubrobacter xylanophilus DSM 9941
MSPDGMERLKRAAAREAVDRYVESGMVVGLGTGTTASWAVRRIGERLLEGSLSGVRGVPTSEYTAALARECGVPLVSLSERRPELTIDGADEIAPDLSVIKGRGGALLREKIVAAASRRGVVIVADGSKQVSLLGNGPLPVEVEPFGWEATAEALAALGCEPELRRVKTQPFVTDGGHYTLDCRFPGIPDPPGLACKIKRVPGALECGLFVGLARAAVIARPEGVEVLEAA

SEQ ID NO: 2930 - DNA, 708 bp, Mesorhizobium sp. BNC1
  CDS (1)..(708): transl_table=11
gtgacggacgcaaagacgcttaagattgaagccgccagggtggcgctgggctatgtcgaagatggcatgaagcttggaatcggcacgggctcgaccgccgaggagttcgtgcggctgcttgcgacgcgcgttagctcggggatgaagatcgtcggcgttcccacctccgagcgcacggctgccctttgccgcgagctgtcggttcccctttcgacgctggatgagacgccggaacttgatctgacggtggacggcgcggacgaagtggggccggacctcacgctgatcaagggcggcggcggtgcgctgcttcgcgagaaaatcgttgccgcggcttcacgccggatgatcgtgattgccgatgagagcaaggtcgttgatgtgcttggcacctttccgctgcccatcgaggtgaatccctttggccttcgcgccaccaggatcgccattgaggccgccgccgcgcgcctcggtcttgccggcgagatgaggacacgtatggccggccaggagccgttcgtaacggacggtggacatttcataatcgatgcatcttttggccgtattcaagcgccaagagcactggcggaggcgctgaatgcaattcccggtgttgtggaacacggtctcttcatcggactggctggcgcggcgattattgcaggcaggaacggtgtcaggacgctcgacgccggcagccgaatctag

SEQ ID NO: 2931 - protein, 235 aa, Mesorhizobium sp. BNC1
MTDAKTLKIEAARVALGYVEDGMKLGIGTGSTAEEFVRLLATRVSSGMKIVGVPTSERTAALCRELSVPLSTLDETPELDLTVDGADEVGPDLTLIKGGGGALLREKIVAAASRRMIVIADESKVVDVLGTFPLPIEVNPFGLRATRIAIEAAAARLGLAGEMRTRMAGQEPFVTDGGHFIIDASFGRIQAPRALAEALNAIPGVVEHGLFIGLAGAAIIAGRNGVRTLDAGSRI

SEQ ID NO: 2932 - DNA, 759 bp, Rhodococcus sp. RHA1
  CDS (1)..(759): transl_table=11
atgtacacgaccgaaaccccccaggacgcggcgaaatacgccgtcggccgggccgcggtggagcgctacgcgcacgacggcgcccaactcggactcggctccggaacgacgtccgcgtggttcgtgcgcgccctcggcgagaaggtcgccgacggcctcgacgtcgtcggtgtccccacctccaccgcaacccgcgacctggccctgtcggtcggtatcaccctcgtcgatctcaacgacctcgaccgcccactcgatgtgacgctggacggacccgacgaggtcgaccacgacggcgacatgatcaagggtggcggcgcctgcctgctgtgggagcgcatggtcgccgaggcctcgtcgaagatggtgtgcatcgcagacgacaccaaactggtcgagcaactcggctccttcccacttccgatcgaggtcatcccgttcgggtggaaggcgactcggcgatcgatctccgcgctgctgaccgacctcggttacaccgatgtcaagatcattcagcgacaccggaacgggcagcctgtcgtcaccgacagcggcaacttcatcctcgacgcccacatggtcgcgatcaccgacaaagccctgctcgacacgaacctcaactggatcgccggcgtcgtggagaacgggctgttcaccggaatcgcccacgaaatcctcatcgcttccccggacggggcggcgaaactcatcgaactgccgcaccggaatgccgccaggatcccggagtggcgcaaatga

SEQ ID NO: 2933 - protein, 252 aa, Rhodococcus sp. RHA1
MYTTETPQDAAKYAVGRAAVERYAHDGAQLGLGSGTTSAWFVRALGEKVADGLDVVGVPTSTATRDLALSVGITLVDLNDLDRPLDVTLDGPDEVDHDGDMIKGGGACLLWERMVAEASSKMVCIADDTKLVEQLGSFPLPIEVIPFGWKATRRSISALLTDLGYTDVKIIQRHRNGQPVVTDSGNFILDAHMVAITDKALLDTNLNWIAGVVENGLFTGIAHEILIASPDGAAKLIELPHRNAARIPEWRK

SEQ ID NO: 2934 - DNA, 714 bp, Trichodesmium erythraeum IMS101
  CDS (1)..(714): transl_table=11
atggtaacagaacaagacccgaccacgttaatgaaacagcaagtcggcaaagctgctgctgaggaagtaaaatctggtatgatagtaggtttaggcacaggttcaactactgcctacatgattcaatttttaggagaactcctccaaagaggtgaactcaaagatatcaaaggtatccctacctccttccagtcaaccgtattagctaaaaagtatggtgtaccattaacaacccttgatgaagttgattatatggatattgccattgatggggcagatgaagttgacccacaaaaaaatctgattaaaggtggtggagccgctcatactcgtgagaaaattgtagactgtttagcagaaaagtttgttgtcgtagtagatagttctaaactagtagataaattgggttctacttttttattgcccgtagaagttatacccatggcaatgaatcctgtaattcgggcgatcgaaaaattgggtggtcaaccagaagtacggatgggagtgaaaaaggccggacctatagtcacagatcaaggtaatttggttattgatgtcaagtttgattccattgataaccctggggagctagaaaaaagtttaaataatattcctggagttttggaaaatggcttatttgtaggggttgcagatgtaattttagtaggagaaattgacaatggaaaaccaatagttaggacaatttcttaa

SEQ ID NO: 2935 - protein, 237 aa, Trichodesmium erythraeum IMS101
MVTEQDPTTLMKQQVGKAAAEEVKSGMIVGLGTGSTTAYMIQFLGELLQRGELKDIKGIPTSFQSTVLAKKYGVPLTTLDEVDYMDIAIDGADEVDPQKNLIKGGGAAHTREKIVDCLAEKFVVVVDSSKLVDKLGSTFLLPVEVIPMAMNPVIRAIEKLGGQPEVRMGVKKAGPIVTDQGNLVIDVKFDSIDNPGELEKSLNNIPGVLENGLFVGVADVILVGEIDNGKPIVRTIS

SEQ ID NO: 2936 - DNA, 711 bp, Hyphomonas neptunium ATCC 15444
  CDS (1)..(711): transl_table=11
ttgccggacatggctagcgacaccgaaaagcagaatgcggccgccgccgcgatggactttgttgaagagggcatgacgattggcctcggcaccggctcaacggcgaaattcttcgtcgagatgctggccgacgagatcgctgatggcctgatcgtgcggtgcatcgaaaccagcaaccagacgcgcgaactggcgcgcagcctcggtgtgccgctgatcccgttcgagcaggtggaccgtatccatctcaccgttgatggcgccgatgaagtcggccccggcggcgtgctgatcaagggcggcggcgccgcgctgctgcgcgaaaagatcatcgccaacgcctccgatcatatggtcgtgattgccgacagctcgaaggaagtgccccatctcggcgcgtttccgctgccggtcgaagtcacgccgttcggctacacgattacggccaagaaggtgcatgacgcgctggtcgcctccggcgtggagcgcccgcgtatcgagctgcgcaaggccgccggcagcactgatcttctggtcacggatggcggaaatcatattctggactgccattgcggccgcattccagaccccgccaagacaggtgcctatctctccggtgtgcccggcgttgtcgagcatggcctgttcatcggcatcgcccgcacggtgatcatcggcgaggaaaatggcgcccatatcattgaatactga

SEQ ID NO: 2937 - protein, 236 aa, Hyphomonas neptunium ATCC 15444
MPDMASDTEKQNAAAAAMDFVEEGMTIGLGTGSTAKFFVEMLADEIADGLIVRCIETSNQTRELARSLGVPLIPFEQVDRIHLTVDGADEVGPGGVLIKGGGAALLREKIIANASDHMVVIADSSKEVPHLGAFPLPVEVTPFGYTITAKKVHDALVASGVERPRIELRKAAGSTDLLVTDGGNHILDCHCGRIPDPAKTGAYLSGVPGVVEHGLFIGIARTVIIGEENGAHIIEY

SEQ ID NO: 2938 - DNA, 702 bp, Oenococcus oeni PSU-1
  CDS (1)..(702): transl_table=11
atggacgcagaacttcaaaacaaactaaaaaaagaggctgccagaaaggctgcctcttacgttaagaacgggatggttgttggtctcggaagtggttcaactgtcaaaatgcttgttgacgaactcggtcgccgcgtcaaagaagaggacttgcagtttaccggggtggcaacctcgatttttacggcccagcaggcaaagtctttgggtattaaaatcgttgatttggacatggtcgactcaatcgatttaacaattgacggcgccgatcaggtagatagtaatttcaacggcattaaaggtgggggcggtaatctgctctgggaaaaaattgttgcgataaattcaaaaaaaatcgtttgggtcgttgataaatcaaaagtcgtcgatacgattggtgcctttccactggctgttgatgttattccttttggaagccaacatgttatgcaaaacttcgataaggcaggttatgagccggttcttcgtcttgataaagaaggaaaacctttcaagacggattccaataatttaataattgatttgcacctgcataagatcgaggaaccaacccaacttgccgataatctaattcagacggtcggcgttgtcgaacatggcttgtttttaaacatggttagcgaagttgttgtcggcaaagaaggacaaccggaaatattggtcaacccaaatattggttaa

SEQ ID NO: 2939 - protein, 233 aa, Oenococcus oeni PSU-1
MDAELQNKLKKEAARKAASYVKNGMVVGLGSGSTVKMLVDELGRRVKEEDLQFTGVATSIFTAQQAKSLGIKIVDLDMVDSIDLTIDGADQVDSNFNGIKGGGGNLLWEKIVAINSKKIVWVVDKSKVVDTIGAFPLAVDVIPFGSQHVMQNFDKAGYEPVLRLDKEGKPFKTDSNNLIIDLHLHKIEEPTQLADNLIQTVGVVEHGLFLNMVSEVVVGKEGQPEILVNPNIG

SEQ ID NO: 2940 - DNA, 699 bp, Oenococcus oeni PSU-1
  CDS (1)..(699): transl_table=11
atggagaaaaatttacagaacgaacttaaaaaagaagccgccattcgggcagctgaatttgttgaaaacgatactgttgttggcctaggtactggatcaacagtcaagtttttggttgatgagttgggacggaaggttagagaagaaaatttatcctttaccggagtgactacttctaagagaactgcttctcaagcggagtctttgggaattaagattgtcagtcttgattcaattccacggattgatctgacgatcgatggagccgatcaggttgataataatttcaatgggatcaagggtgggggagccgctttgctgtgggaaaaaatcgttgccacaaattctaaaaaaaatatctggattgtcgaccaatccaagctggtcgacagaattggaagttttccgcttccggttgaagttattccctttggtgctttacatgtcttaaataaattcgaagagctcaatctcaatccggctttgagattgacggaaaatggaaagaaagtcatgactgattcccaaaattatattatcgatttgcatttaaatcagattattgatccggccaagctttccaatcaattgattaatacagttggcgtggttgagcatggattattcttaaatgtagtcgataaggttgttgttggcaaaaaaggccaacccctcattctggaaaatcccgataaataa

SEQ ID NO: 2941 - protein, 232 aa, Oenococcus oeni PSU-1
MEKNLQNELKKEAAIRAAEFVENDTVVGLGTGSTVKFLVDELGRKVREENLSFTGVTTSKRTASQAESLGIKIVSLDSIPRIDLTIDGADQVDNNFNGIKGGGAALLWEKIVATNSKKNIWIVDQSKLVDRIGSFPLPVEVIPFGALHVLNKFEELNLNPALRLTENGKKVMTDSQNYIIDLHLNQIIDPAKLSNQLINTVGVVEHGLFLNVVDKVVVGKKGQPLILENPDK

SEQ ID NO: 2942 - DNA, 687 bp, Leuconostoc mesenteroides subsp. mesenteroides ATCC 8293
  CDS (1)..(687): transl_table=11
atgagttcatcacaggatttacaaaaaattattgcaggtcgccgcgccgccgactttgttcaggacggtatggtagtgggcattggctctggatcaacaattgctcaagtcattaccgctttaggtgaacgcgtggccaatgaaaatttaaaaatcgtcggcgtccctacttctgaaaagacaaggcgcaatgctgcaaaactagggatcccgatgtacaacgttgatgatgtcgataaaattgatcttacaattgatggagctgaccaaatttcggatgatttctcagccattaaaggtggcggggccgcgcttttatgggaaaaaatcgttgcgtttaactctcgtgagaatatctgggttgtagacagtagcaaacgtgtatccaaactaaatcagtatttgccagtcgaaattattccatatggatctgaccaattatttaaacgctttactgcagatgggttccatcctacttggcgtttagatcaaaatggcaaccctgtacgtacagattcagcaaattacctcattgatctacatgttcccgttatcgaagatccacgtgatttgggtcaagaattaattaatatggtcggtgttgtagagcacggtctgttcactgatgttgttaaccgtgtagtcattggtagtgatgatggcgttgaaattattgaagcaccgtaa

SEQ ID NO: 2943 - protein, 228 aa, Leuconostoc mesenteroides subsp. mesenteroides ATCC 8293
MSSSQDLQKIIAGRRAADFVQDGMVVGIGSGSTIAQVITALGERVANENLKIVGVPTSEKTRRNAAKLGIPMYNVDDVDKIDLTIDGADQISDDFSAIKGGGAALLWEKIVAFNSRENIWVVDSSKRVSKLNQYLPVEIIPYGSDQLFKRFTADGFHPTWRLDQNGNPVRTDSANYLIDLHVPVIEDPRDLGQELINMVGVVEHGLFTDVVNRVVIGSDDGVEIIEAP

SEQ ID NO: 2944 - DNA, 690 bp, Leuconostoc mesenteroides subsp. mesenteroides ATCC 8293
  CDS (1)..(690): transl_table=11
atgaacaagcaaaagaaacatgccggtgaatttgccgccacactaatagaagatggaatggttgttggtcttggaacaggttctacgatagcatactttttagaggcattagctaaacgtattcaagatgaaaaaatgactattattggcgtgaccacctcaacaaagactgccagatgtgcggaagaacttggtattccgattcgtgatattgacttagtaccaatgatagatttaacaattgatggtgcggatgaggttgatcagcatttaaatggcatcaaaggtggtggagcagctttcttaatggaaaaaattgtggcgagatattctagacgtgtgatttggattattgacgaacagaagctgcatagtaaactgggacaatttcctttgccagtagaagtagtagcatttggcagtggtaaactaatagctgaactaaaagagcgtcatttgcaccccaaattacgtctagacaaccatcagcaaccgctagtaacggacttaggacactatattgttgatctagatttagaacaaattgatcagccgtttgaactagggcgttatttagatggacagattggtatcgttgagcatgggctatttctaaatgttgcggatcaagttattattggacaggacgaaggctatcggatcatgaataatttacagaaagaaatgtaa

SEQ ID NO: 2945 - protein, 229 aa, Leuconostoc mesenteroides subsp. mesenteroides ATCC 8293
MNKQKKHAGEFAATLIEDGMVVGLGTGSTIAYFLEALAKRIQDEKMTIIGVTTSTKTARCAEELGIPIRDIDLVPMIDLTIDGADEVDQHLNGIKGGGAAFLMEKIVARYSRRVIWIIDEQKLHSKLGQFPLPVEVVAFGSGKLIAELKERHLHPKLRLDNHQQPLVTDLGHYIVDLDLEQIDQPFELGRYLDGQIGIVEHGLFLNVADQVIIGQDEGYRIMNNLQKEM

SEQ ID NO: 2946 - DNA, 696 bp, Leuconostoc mesenteroides subsp. mesenteroides ATCC 8293
  CDS (1)..(696): transl_table=11
atgaatgaaaaaaatttccaaaaaaaacaagcagccctcgccgctttaaattatatccagaccgatatgattatcggactaggaactggttcaactgtttcttattttttagatgctttagctgcttctcaatataacgtcatcggcgtgaccacttcaacaattactagtcagcgatgcgcagaattaaatattccaattgtcgacattgatgccattgaccatattgatgttacagttgatggtgcagatgaagtcgattcctaccttaacggtataaaaggtggcggagctgccctactgatggagaaaatagtagctaaaaactcaaagaaaaatatctggatcgttgatcgcagtaaagtgcacaacacgctaggttctttcccgctgcccgtagaggttatcccctacggtagcggtcagttgttacgacaatttgccaataaaggtctgttcccaaagctacgtcgtcatcccggaaataaccagcccgttatcactgatgctggtcactacattattgattgccatatgaccacaattaacaatccatatgccctcgccgaatatcttgaaagccaagttggcgttgttgagcacggtttgtttttaaatatttgtgatcgaataattattggcgataacacagtagaaattaaagaacgacagcaagctcatgtggagataaactga

SEQ ID NO: 2947 - protein, 231 aa, Leuconostoc mesenteroides subsp. mesenteroides ATCC 8293
MNEKNFQKKQAALAALNYIQTDMIIGLGTGSTVSYFLDALAASQYNVIGVTTSTITSQRCAELNIPIVDIDAIDHIDVTVDGADEVDSYLNGIKGGGAALLMEKIVAKNSKKNIWIVDRSKVHNTLGSFPLPVEVIPYGSGQLLRQFANKGLFPKLRRHPGNNQPVITDAGHYIIDCHMTTINNPYALAEYLESQVGVVEHGLFLNICDRIIIGDNTVEIKERQQAHVEIN

SEQ ID NO: 2948 - DNA, 699 bp, Bifidobacterium longum DJO10A
  CDS (1)..(699): transl_table=11
atggataaggcacagcaggatgcgctgaagaaggcggccggcatcgaagccgccaagctcgttgaaaacggcatgatcgcaggcctcggcactggttcgaccgtgaagttcctggtggacgagctcggccgccgtcatcaggaggaaggtcttgagttcactggcgtaaccacgtctcgccgcacgcaggtccaggctgaaagctacggcatcaagatcgtggacatcgacgacgtggaccacatcgacgtgaccattgacggcgccgacgaagtcgacaagaacttcaacggtatcaagggcggtggcgctgctctgctgtgggagaagatcgtggccaccaactccaaccagatcgtgtggattgtggacgagtccaaggttgtggacaccatcggcaagttcccgctgccggtcgaggtcattccgttcggtgccggccaagtcatcaagaagttcgaggcccgcggctacaagccggtgcttcgtcttgacgccgacggcaaggaagtgcgcaccgacgagaacaacttcgtggtggacctgcacctggagcgcatcgatcacccgcaggagctggccgaagacctcatcaacacggtcggcgtggtggagcacggcctgttcctcaacatggtcgacaaggtcatcgtcggcgacccgaacggcccgcgcgtgatgaccaacgccaacaagtga

SEQ ID NO: 2949 - protein, 232 aa, Bifidobacterium longum DJO10A
MDKAQQDALKKAAGIEAAKLVENGMIAGLGTGSTVKFLVDELGRRHQEEGLEFTGVTTSRRTQVQAESYGIKIVDIDDVDHIDVTIDGADEVDKNFNGIKGGGAALLWEKIVATNSNQIVWIVDESKVVDTIGKFPLPVEVIPFGAGQVIKKFEARGYKPVLRLDADGKEVRTDENNFVVDLHLERIDHPQELAEDLINTVGVVEHGLFLNMVDKVIVGDPNGPRVMTNANK

SEQ ID NO: 2950 - DNA, 618 bp, Listeria monocytogenes str. 4b H7858
  CDS (1)..(618): transl_table=11
atggttgtgggccttggaacgggcagtacagtctattacacgattgaaaagcttggagaaatggtaaataatggtttgcatattacaggggtggcaacttctgaagaaacaagcaaacaagcacaaaatttaggaatacctttgaaatcgctaaatgacgtagcggaaatagatattactattgatggtgctgatgaaattgatacggattttcaaggaataaaaggtggaggaggagcactattacgtgaaaaaatggtagcaagtgcgagtttgaaaaacatttgggttgtcagtgaggagaagcttgtaagaaacttagggaagtttcctttgcctatagaagtaataccttttggttggaagcaaattgagagaacacttgaaaaagagcatgttcaaacaattttacggagacaatcttcaggagaaatctatgtgacaaataacgggaactatattttggatatagtaaatcaaacttttagggatgcagaaatgtggcaagaaaaattagcgcaaattccagggattgtggagcatggattatttcttcattatgtggatataattgtttgtgcgaaggcaaatggcgaaatagagctaataaaaaaatag

SEQ ID NO: 2951 - protein, 205 aa, Listeria monocytogenes str. 4b H7858
MVVGLGTGSTVYYTIEKLGEMVNNGLHITGVATSEETSKQAQNLGIPLKSLNDVAEIDITIDGADEIDTDFQGIKGGGGALLREKMVASASLKNIWVVSEEKLVRNLGKFPLPIEVIPFGWKQIERTLEKEHVQTILRRQSSGEIYVTNNGNYILDIVNQTFRDAEMWQEKLAQIPGIVEHGLFLHYVDIIVCAKANGEIELIKK

SEQ ID NO: 2952 - DNA, 663 bp, Bacillus cereus G9241
  CDS (1)..(663): transl_table=11
atgaatttaaaacagctcgctggtgaatatgctgcttactttgtaaatgatggcatgaagattgggcttggtacaggttctactgtatattggacaatacaaaaattaggtgagcgtgtaaaagaaggattatcatttcaagctgtaccgacatcaaaggaaactgaagcattagcacatcaactaaatatccctctaatttcgttaaacgacgtacaaagtcttgatcttacaattgatggagcggatgaaattgattcaaatttacaacttataaaaggaggcggtggcgcattacttcgtgaaaaaatcgttgcctcttcctctaaagaactacttatcattgttgatgaatcgaaactcgtaacgcatttaggtactttcccattacctgttgaaattatacctttttcatggaaacaaaccgaaaggaaaattcaatctttaggttgtcaaacaacgttacgtttaaaaaataatgaaatatttataaccgataataataatatgattgtcgattgtatatttcctaatcatatagctactccttccgctttacacaaaagattaaaaatgattactggtgtagttgaaaccggattgtttgttaacatgactagtaaggcgattattggaacaaagaatgggattaaggaattataa

SEQ ID NO: 2953 - protein, 220 aa, Bacillus cereus G9241
MNLKQLAGEYAAYFVNDGMKIGLGTGSTVYWTIQKLGERVKEGLSFQAVPTSKETEALAHQLNIPLISLNDVQSLDLTIDGADEIDSNLQLIKGGGGALLREKIVASSSKELLIIVDESKLVTHLGTFPLPVEIIPFSWKQTERKIQSLGCQTTLRLKNNEIFITDNNNMIVDCIFPNHIATPSALHKRLKMITGVVETGLFVNMTSKAIIGTKNGIKEL

SEQ ID NO: 2954 - DNA, 702 bp, Crocosphaera watsonii WH 8501
  CDS (1)..(702): transl_table=11
atgtcagatccggttgtcatgatgaaacaagaggtgggtaaagcagccgcagcccgcgttaagtcagattcgattgtgggtttaggcacaggctcaaccactgcctatgccatacaatatatcggtgaacgattacaatcgggagacttaaaaaatattattggtgttaccacctcgtttcaagcagaagtcttggcgagaaagtataatattcctttaagcaccctagatgtggtcgatcgcatcgatatagccatcgatggagccgatgaggttgatcctcagaagaatttaattaagggtggtggtgcagcacatacccaagaaaaaattgtcgatagtttagcagaacagtttattgttgtggttgatggcggtaaactggtggataagttgggttcaactttcctcttgccggtggaagtgattcccaaagccgttgttcctgtgatgcgcaagttggaacaattgggcggtaaaccagatttacgcatgggagttaaaaaagctggcccagtagttacggatcaaggcaacttggtggttgacgtgaagtttgacagtatcgatgaccctgctaccttagaaaaaaccattaataacattcctggtgtcctagaaaatggtttatttgttggggtcactgatgtggtattggtgggcgagattattgataataagcctgttgttcgagaaatttaa

SEQ ID NO: 2955 - protein, 233 aa, Crocosphaera watsonii WH 8501
MSDPVVMMKQEVGKAAAARVKSDSIVGLGTGSTTAYAIQYIGERLQSGDLKNIIGVTTSFQAEVLARKYNIPLSTLDVVDRIDIAIDGADEVDPQKNLIKGGGAAHTQEKIVDSLAEQFIVVVDGGKLVDKLGSTFLLPVEVIPKAVVPVMRKLEQLGGKPDLRMGVKKAGPVVTDQGNLVVDVKFDSIDDPATLEKTINNIPGVLENGLFVGVTDVVLVGEIIDNKPVVREI

SEQ ID NO: 2956 - DNA, 648 bp, Xylella fastidiosa Ann-1
  CDS (1)..(648): transl_table=11
atgagcgaagcaaaacggcgcgccgccgaaaaggccatcgaatacgtcgagaacgatatgattatcggcgtcggcaccggctcaacagtcgcctacttcatcgacgcactaggacacacccccaaacgcatcaaaggtgcagtatccagctccgaacagagcacagcacatttaaaacaacacggaattgaagtcctggaactcaatcataccggcacactcccactctatgtggacggtgcagacgagtgcgacccgtacaaacgccttatcaaaggaggcggcgcatcattaacacgcgagaagatcatcgctgaagcaagcaaacaattcatttgtatcatcgacccaaacaaacaggtagcaacactaggcaaattcccactacccatcgaagtgatcccaatggcacgcagcttggttgcaaggcaaatcatgacacttaccgacggtcaaccagtatggcgtgaaggggtcattaccgataacggcaacgttatcctggatgtacatcacttatgcatcaccgacccggtaaagctagagcaagaactcaatcaaatcccaggggtcgtctgcgtcggcctgttcgcccgtcgctgtgcggacctagttatcatcggcagcgaaccgccgcacatactctga

SEQ ID NO: 2957 - protein, 215 aa, Xylella fastidiosa Ann-1
MSEAKRRAAEKAIEYVENDMIIGVGTGSTVAYFIDALGHTPKRIKGAVSSSEQSTAHLKQHGIEVLELNHTGTLPLYVDGADECDPYKRLIKGGGASLTREKIIAEASKQFICIIDPNKQVATLGKFPLPIEVIPMARSLVARQIMTLTDGQPVWREGVITDNGNVILDVHHLCITDPVKLEQELNQIPGVVCVGLFARRCADLVIIGSEPPHIL

SEQ ID NO: 2958 - DNA, 738 bp, Xylella fastidiosa Ann-1
  CDS (1)..(738): transl_table=11
atggaaattgctactgtcactagagtgaactcaacacaaccagccaatgcctgtgcgccttcccacatccccatcatcattgataaccccatgagcgaagcaaaacggcgcgccgccgaaaaggccatagaatacgtcgagaacgatatgattatcggcgtcggcaccggctcaacagtcgcctacttcatcgacgcactaggacgcaccccaaaacgcatcaaaggtgcagtatccagctccgaacagagcacagcacatttaaaacaacacggaattgaggtcctggaactcaatcataccggcacactcccactctatgtggacggtgcagacgagtgcgacccgtacaaacgccttatcaaaggaggcggcgcatcattaacacgcgagaagatcatcgctgaagcaagcaaacaattcatttgtatcatcgacccaaacaaacaggtagcaacactaggcaagttcccactacccatcgaagtgatcccaatggcacgcagcttggttgcaaggcaaatcatggcacgtaccgacggtcaaccagtatggcgtgaaggggtcattaccgataacggcaacgttatcctggatgtacatcacttatgcatcaccgacccggtaaagctagagcaagaactcaatcaaatcccaggggtcgtctgcgtcggcctgttcgcccgtcgctgtgcggacctagttatcatcggcagcgaaccgccgcacatactctga

SEQ ID NO: 2959 - protein, 245 aa, Xylella fastidiosa Ann-1
MEIATVTRVNSTQPANACAPSHIPIIIDNPMSEAKRRAAEKAIEYVENDMIIGVGTGSTVAYFIDALGRTPKRIKGAVSSSEQSTAHLKQHGIEVLELNHTGTLPLYVDGADECDPYKRLIKGGGASLTREKIIAEASKQFICIIDPNKQVATLGKFPLPIEVIPMARSLVARQIMARTDGQPVWREGVITDNGNVILDVHHLCITDPVKLEQELNQIPGVVCVGLFARRCADLVIIGSEPPHIL

SEQ ID NO: 2960 - DNA, 675 bp, Streptococcus suis 89/1591
  CDS (1)..(675): transl_table=11
  misc_feature (562)..(562): n is a, g, c or t
atgacaaacctaaaagagcaggttgggattaaggcggcggagtttgtgacggacggtatgattgttgggctggggactggttcgacggcatactatttcgtgcaggagattggccgccgggttgcagaagaagggttacaaatcacaggcgtaacgacctctcatgctacggcagaacatgctgcgtcccttgggattcccctaaaaaatatcgacgaagtcgaatatgtggacttgacggtggatggagcagatgaggttgatggtgacttcaatgggattaaaggcggtggcgcagcgcttctcatggagaaagtggtagcagtcaatagcaaggactgcatctggattgtggatgagtctaaggtggttcaaaccctaggagccttcaagttgccggtggaagttgtacagtacggtgcggaaaatcttttccgactatttgagaaaaaagggtatcgtccaagttttcgtatgcgtaatggagaaaaacatatcacggatatgcagaactttatcattgaccttgatttgcgcagaatagaagacacatatgcattgncggaagaattggatcggaccgtcggtgttgtagaacacggtctctttattggattgatttccaaggtaattgttggtacaccagaaggaccgaacatcatcgaaaagaaataa

SEQ ID NO: 2961 - protein, 224 aa, Streptococcus suis 89/1591
  misc_feature (188)..(188): The Xaa at location 188 stands for Ala, Pro, Ser, or Thr.
MTNLKEQVGIKAAEFVTDGMIVGLGTGSTAYYFVQEIGRRVAEEGLQITGVTTSHATAEHAASLGIPLKNIDEVEYVDLTVDGADEVDGDFNGIKGGGAALLMEKVVAVNSKDCIWIVDESKVVQTLGAFKLPVEVVQYGAENLFRLFEKKGYRPSFRMRNGEKHITDMQNFIIDLDLRRIEDTYALXEELDRTVGVVEHGLFIGLISKVIVGTPEGPNIIEKK

SEQ ID NO: 2962 - DNA, 789 bp, Sulfitobacter sp. EE-36
  CDS (1)..(789): transl_table=11
atgaccggagaattgtcacccatcgataaggccaaatttgtcgccgccaaacgcgctgcacaatttgtagaagacggaatgcgcgtcggattgggcaccggctctaccgccgcgtggctggtgcgctgcttgggcgagatggtgcgcgacgacggcttgcggatcaaaggcgtgcccacatcgacccgtaccgcgcagctggcgcgcgaagtggggatcgaggtgatcagccttgatgaagccaagtggctggacctgaccatcgatggcgcggacgagttcgacggagagctgaacctgatcaagggcggcggcggtgccttgctgcaagaaaagatcgtggccaccgcctccgatcaaatggtcgtgattgccgacatcggtaaagaggtcgaaacactgggcgcatttccccttccggtagaggttattccctttggctggcagaccacacaagcgcttgtcgaagagactttggtgtcgatggacgtgctggggcgcaattccacgctgcgtatgaacggcgacatccccttcgtgacggacgaggggaactacatccttgacctgcatctcaagcggatcggcaacacccgccagatggccttggtcatgaaccagatgccgggcgtagttgaaaacgggctattcattgatatctgtgatgccgtggtgatcggctatggcgatggccgcgtcgaagtgcgcgacatcaacgaaggcactgttgatcgcgataagatggagtttgtcgagacggataacctgttctccgacctgagcgattaa

SEQ ID NO: 2963 - protein, 262 aa, Sulfitobacter sp. EE-36
MTGELSPIDKAKFVAAKRAAQFVEDGMRVGLGTGSTAAWLVRCLGEMVRDDGLRIKGVPTSTRTAQLAREVGIEVISLDEAKWLDLTIDGADEFDGELNLIKGGGGALLQEKIVATASDQMVVIADIGKEVETLGAFPLPVEVIPFGWQTTQALVEETLVSMDVLGRNSTLRMNGDIPFVTDEGNYILDLHLKRIGNTRQMALVMNQMPGVVENGLFIDICDAVVIGYGDGRVEVRDINEGTVDRDKMEFVETDNLFSDLSD

SEQ ID NO: 2964 - DNA, 789 bp, Roseovarius nubinhibens ISM
  CDS (1)..(789): transl_table=11
atgtcaggggaattgtcgcccatcgatcaggccaaattcgtcgccgcgaagaaggcggtggaatatgtcgaggacggcatgcgcgtcgggctcggcactggcagcacggcggcctggatggtgcgatgccttggcgaaatggtgcgcgaggacgggctgcgcatcaagggcgtgccgacctcgacccggaccgccgcgctggcgcaggagttgggcatcgacgtggtcagtctcgacgaggccaaatggctcgacctgacgattgacggggcggatgagttcgatggcgagctgaacctgatcaagggcggcggcggcgcgctcttgcaagaaaagatcgtggccaccgccagcgaccagatgatcgtgatcgccgatgtcggcaaggaggtcgaaagcctcgggcatttcccgctgcccatcgaagtgatcccctttggctggcagacgacccgggcgctggtcgaagaaatgctggtctcgatggatgtgctgggccgcgacgtgacgctgcggatgagcggcgaccggccctatgtgaccgatgagggcaatcacattctcgacctgcatctcggccggatcggcaacccgcgacaattgtcgatggtgctcaatcaagtgccgggggtcgttgaaaacgggctattcattgatatctgtgacattgtctgcgtgggctatggcgatggccgcgtggaagtgcgggacatcaatgacggcacggtgcgccaggaccggctcgatttcgtggaaagcgacaatctgttctcggacctgtcggactga

SEQ ID NO: 2965 - protein, 262 aa, Roseovarius nubinhibens ISM
MSGELSPIDQAKFVAAKKAVEYVEDGMRVGLGTGSTAAWMVRCLGEMVREDGLRIKGVPTSTRTAALAQELGIDVVSLDEAKWLDLTIDGADEFDGELNLIKGGGGALLQEKIVATASDQMIVIADVGKEVESLGHFPLPIEVIPFGWQTTRALVEEMLVSMDVLGRDVTLRMSGDRPYVTDEGNHILDLHLGRIGNPRQLSMVLNQVPGVVENGLFIDICDIVCVGYGDGRVEVRDINDGTVRQDRLDFVESDNLFSDLSD

SEQ ID NO: 2966 - DNA, 789 bp, Oceanicola batsensis HTCC2597
  CDS (1)..(789): transl_table=11
atgtccggagagctgtcgccaatcgacaaggcaaaattcgttgccgccaagcggtccgtcgactttgtcgaggacgggatgcgcgtcggcctcggcaccgggtcgaccgccgcctggatggtccgctgtctcggcgaactggtgcgcgaggacgggctgaggatcaagggcgtgccgacgtccacccgcacggcgcagctggcgcgggaggtgggcatcgaggtgatctcgctcgacgaggcgaagtggctcgacctgacgatcgacggcgcggacgagttcgacagcagcctgaacctgatcaagggcggtggcggcgcgctgctgcaggaaaagatcgtcgcgaccgccagcgaccagatgatcgtgatcgcggatatcggcaagcaggtcgatgcgctcggcgccttcccgctgccgatcgaggtcatccccttcggctggcagacgacccaggcgctggtcgaggagacgctgatctcgatggacgttctgggccgcaactcgaccctgcggatgaacggtcagcgtcccttcgtgacggacgagggcaactacatcctcgatctgcacctcaaccgcatcggcgatgcccgccagctcgccatggtgctgaaccagatgccgggggtggtcgagaacgggctcttcatcgacatctgcgactgcgtcatcgtgggcttcggcgacggccgggtcgaggtgcgcgacatcaatgccggcacggtcgaggagagccggctcgatttcctcgaggacgacaacctgttctcggacctcagcgactga

SEQ ID NO: 2967 - protein, 262 aa, Oceanicola batsensis HTCC2597
MSGELSPIDKAKFVAAKRSVDFVEDGMRVGLGTGSTAAWMVRCLGELVREDGLRIKGVPTSTRTAQLAREVGIEVISLDEAKWLDLTIDGADEFDSSLNLIKGGGGALLQEKIVATASDQMIVIADIGKQVDALGAFPLPIEVIPFGWQTTQALVEETLISMDVLGRNSTLRMNGQRPFVTDEGNYILDLHLNRIGDARQLAMVLNQMPGVVENGLFIDICDCVIVGFGDGRVEVRDINAGTVEESRLDFLEDDNLFSDLSD

SEQ ID NO: 2968 - DNA, 696 bp, Synechococcus sp. RS9917
  CDS (1)..(696): transl_table=11
atgaagcaggccgtggccgccgccgccgtggatgcgatccaggacggcatggtgctcggcctgggatccggttccacggccgcactgatgatccagggtcttggcgccaagctggccgccggtgagctgcgcgacatcgtcggtgtcaccacgtcgtttcaaggcgaggtgttggcggctgagctgggaatcccgctgcgcagtctcaatgcggtggagcgcatcgacctggccatcgacggagccgatgaagtggacccggcgtttcaactgatcaagggcggcggtgcctgccacgtgcaggagaaactggttgccgctcgcgccgagcgtttcatcgttgtggtggatgccaccaaattggtggaccgcctcaacctgggctttctgctgcccgtggaggtgctcccgggagcctggaggcaggttcaggcgcgtctcgccagcctgggtggggcggcagagctgcggatggccacccgcaaagccggtcccgtggtgacggatcaggggaatctggtgctggatgtgcgcttcggcgaaggcattgctgacccccgcgctctggagcagacgatcaacaacattcccggcgtgctcgagaacggtttgtttgtggatctggccgatgaggtgctggtcggtgaggtcaccgatggggtggccggcgtccgccggctcgagcggcaaggctga

SEQ ID NO: 2969 - protein, 231 aa, Synechococcus sp. RS9917
MKQAVAAAAVDAIQDGMVLGLGSGSTAALMIQGLGAKLAAGELRDIVGVTTSFQGEVLAAELGIPLRSLNAVERIDLAIDGADEVDPAFQLIKGGGACHVQEKLVAARAERFIVVVDATKLVDRLNLGFLLPVEVLPGAWRQVQARLASLGGAAELRMATRKAGPVVTDQGNLVLDVRFGEGIADPRALEQTINNIPGVLENGLFVDLADEVLVGEVTDGVAGVRRLERQG

SEQ ID NO: 2970 - DNA, 714 bp, Synechococcus sp. WH 5701
  CDS (1)..(714): transl_table=11
atggccgagctgcaggaccggatgaagctggccgtggccacggccgccgtcgatcagatccgggacggcatggtgctcggcctgggctccggctccaccgccgccctgatgatccgggaactcggcgcccgcctgcggcggggtgagctctcagccatcaccggggtgaccacctcgttccagggggaggtgctcgccgctgagctgggcatccccctgcagagcctcaatgccgtctcccgcatcgacctggcgatcgatggcgccgatgaggtcgaccccgccttccagctgatcaaggggggtggggcttgccacgtgcaggagaagctggtggcccgccgggccgaccgcttcgtggtggtggtcgattccagcaagctggtgaagcgactcaacctggagttcctcctgccggtggaggtcctgcccggggcctggcgccaggtgaaggcggaactggaggcgatgggcgccaccgctgacttgcgcatggctgtgaagaaggcaggcccggtggtcaccgaccaggggaacctggtgctcgatctcaagttcgctggcggcatcaccgatccagcggccttggagcaggcgatcaacaacctgccaggggtgctggagaacgggctgttcgtgggcctcaccgaccaggtcctggtgggcgagatcgtcgacggggagccccgggtgcgggatctcgagcggatctga

SEQ ID NO: 2971 - protein, 237 aa, Synechococcus sp. WH 5701
MAELQDRMKLAVATAAVDQIRDGMVLGLGSGSTAALMIRELGARLRRGELSAITGVTTSFQGEVLAAELGIPLQSLNAVSRIDLAIDGADEVDPAFQLIKGGGACHVQEKLVARRADRFVVVVDSSKLVKRLNLEFLLPVEVLPGAWRQVKAELEAMGATADLRMAVKKAGPVVTDQGNLVLDLKFAGGITDPAALEQAINNLPGVLENGLFVGLTDQVLVGEIVDGEPRVRDLERI

SEQ ID NO: 2972 - DNA, 717 bp, Synechococcus sp. WH 7805
  CDS (1)..(717): transl_table=11
atgtcggaacttcagaatcagatgaagcaggccgtcgctgatgctgcagtggagcaattccaagacggcatggtggttgggcttgggtccggctcaacagcggccctcatgatcaagggattgggtgaacgccttgctgcaggtcaactgaacgacatcgtgggagtcacaacgtctttccagggtgaagttcttgcagctgaactagggattcctctccgcagcctcaatgcggtggaccgaatcgatctggcgatcgacggtgctgatgaggtcgacccttcgttccaactcattaagggtggtggtgcttgccatgtgcaggagaaacttgtcgctgctcgagctgaccgtttcatcgtggtggtcgattccaccaagctcgtggagcgtttgaatcttgggtttttgcttcccgtcgaggtcctgcccggtgcctgggtgcagattcgccagcaactgaatgccatgggtggcgaagccgaactgcgcatggccacccgcaaggccggtcctgtggtgaccgatcagggcaacctggttctggatgtgcgatttgagggtggcatcgctgatcccgtctctcttgaaaaggacatcaacaacattcccggcgtccttgagaacggtctgttcgtcaaccttgctgacgaggtcctcgttggacaggttgatgatggtgttgccagcgcacgcagccttgagagggcccgctga

SEQ ID NO: 2973 - protein, 238 aa, Synechococcus sp. WH 7805
MSELQNQMKQAVADAAVEQFQDGMVVGLGSGSTAALMIKGLGERLAAGQLNDIVGVTTSFQGEVLAAELGIPLRSLNAVDRIDLAIDGADEVDPSFQLIKGGGACHVQEKLVAARADRFIVVVDSTKLVERLNLGFLLPVEVLPGAWVQIRQQLNAMGGEAELRMATRKAGPVVTDQGNLVLDVRFEGGIADPVSLEKDINNIPGVLENGLFVNLADEVLVGQVDDGVASARSLERAR

SEQ ID NO: 2974 - DNA, 657 bp, Pseudoalteromonas tunicata D2
  CDS (1)..(657): transl_table=11
atgacacaagatgaaatgaaaaaagccgccgcgtgggctgcactcgaatacgtagaaaaagacagcattataggtgtaggcacaggctcaacagtgaaccactttattgatgcccttggcacaataaaaggtgatattcgtggtgcagtatctagctcagaagcctcaaccgaaaaattaaaagcgcttggcattgagatatttgagctcaatgatgttgatggcttaagtgtttatgttgacggtgccgatgaaattaatcccgccaatgaaatgattaaaggcggtggcgctgcactgactcgcgaaaaaattgtcgcagcagtcgctaaaaagtttgtttgtattgttgatagcagcaaacaagtagacgtattaggtaatttcccattaccggttgaagtcattcctatggcacgcagctatgttgccagagaattagttaagttaggtggtgacccaatgtatcgccaaggtgtagtcactgataacggtaatgtcatcttagatgtgtttaatctacagatcagtcaagccaaacaattagagcaacaaattaatcaaatcgtcggtgttgttaccaatggcctgttcgccgctcgtggtgcagacgttgttattgtcggcacccccgatggaccaaaaatactgaaataa

SEQ ID NO: 2975 - protein, 218 aa, Pseudoalteromonas tunicata D2
MTQDEMKKAAAWAALEYVEKDSIIGVGTGSTVNHFIDALGTIKGDIRGAVSSSEASTEKLKALGIEIFELNDVDGLSVYVDGADEINPANEMIKGGGAALTREKIVAAVAKKFVCIVDSSKQVDVLGNFPLPVEVIPMARSYVARELVKLGGDPMYRQGVVTDNGNVILDVFNLQISQAKQLEQQINQIVGVVTNGLFAARGADVVIVGTPDGPKILK

SEQ ID NO: 2976 - DNA, 660 bp, Photobacterium sp. SKA34
  CDS (1)..(660): transl_table=11
atgacacaagatgaaatgaaaaaagcagcaggttgggcagcacttgaatacgtacagaaaggaacaattgtaggtgtaggtactggctctacggttaatcacttcatcgatgccttagcaactcgcaaagaagaaattaaaggtgctgtttcaagttcagtcgcttcaactgaacgtcttgaacaactaggcattactgtatttgatgcgaatgaagttgcttcacttgatatttatgtcgatggtgctgatgaaattaacgcagactacgacatgattaaaggcggtggtgcggcgcttactcgtgaaaaaatcgtggcagccatcgcgaaaaaatttatctgtatcgttgatgacaccaagcaagttgacgtattgggccaattcccgcttccagttgaagtaatccctatggggcgctctttcattggtcgtgagttggtaaaacttggtggcgatccggcttaccgtgaaggcgttgtgaccgataacggtaatatgatccttgatgtctacaacatgaagatcacagatcctaaaacaatggaagataagatcaacgccctacctggtgtggtaactgttggtctatttgctcaccgtggcgctgatgtattattggttggctcacctgacggtgtaaaaaaattcgagaaataa

SEQ ID NO: 2977 - protein, 219 aa, Photobacterium sp. SKA34
MTQDEMKKAAGWAALEYVQKGTIVGVGTGSTVNHFIDALATRKEEIKGAVSSSVASTERLEQLGITVFDANEVASLDIYVDGADEINADYDMIKGGGAALTREKIVAAIAKKFICIVDDTKQVDVLGQFPLPVEVIPMGRSFIGRELVKLGGDPAYREGVVTDNGNMILDVYNMKITDPKTMEDKINALPGVVTVGLFAHRGADVLLVGSPDGVKKFEK

SEQ ID NO: 2978 - DNA, 672 bp, Neptuniibacter caesariensis
  CDS (1)..(672): transl_table=11
atgacccaggacgagatgaaaaaagcagttgctgaagctgctgtggagtacatcaaacctaaacttacagaagatagcattgtcggggttggtaccggctcaacggctaatttctttatcgatgccctcgcagagatcaagcatatgtttgagggagcagttgccagttcagaagcgactgcagaacgtttgaaaggtcatggtattgaggtgttcgatatgaactcagtatcagagatggaagtttatgtagatggtgctgacgaatttgattcaggcctgaaccttgtaaaaggtggcggtggcgcattaacccgtgaaaagattgttgcggctgtagctaaagagtttgtctgcattgtggatagcagtaaaaaagtggacgttctaggggagttcccattgcctgttgaggtgattccaatggcacgttcgcaagtggcgcgtgagctagtcaaactggatggtatgcctgagtggcgacagggttttgtaacagataatggtaatctgattcttgatgttcatgaccttgaaatcatgcgtccgaaggagctggaaaaacagcttaataatatcgtcggtgtagtgaccaatggtctgtttgcaaaccgtggagcggatgtagtccttatgggaactgagtctggcgttgagacgataaagctttaa

SEQ ID NO: 2979 - protein, 223 aa, Neptuniibacter caesariensis
MTQDEMKKAVAEAAVEYIKPKLTEDSIVGVGTGSTANFFIDALAEIKHMFEGAVASSEATAERLKGHGIEVFDMNSVSEMEVYVDGADEFDSGLNLVKGGGGALTREKIVAAVAKEFVCIVDSSKKVDVLGEFPLPVEVIPMARSQVARELVKLDGMPEWRQGFVTDNGNLILDVHDLEIMRPKELEKQLNNIVGVVTNGLFANRGADVVLMGTESGVETIKL

SEQ ID NO: 2980 - DNA, 678 bp, Oceanobacter sp. RED65
  CDS (1)..(678): transl_table=11
atgaatcaggatcaactcaagcaagcagtcggccaagctgctgtggattacatcaagccgcatctacaaaaagatagcattattggcgtaggcacaggtagcacagcaaattgctttattgatgcccttgcagaactaaagaatgattttgatggcgccgttgccagttccgaggcgaccgctgaaagactaaaaagccatggcattcccgtctatgacttgaattcctctggcactctcgacttttacattgatggtgccgacgaaaccaacgatcacctacagttaattaaaggcggtggtggtgcactaactcgggaaaaaatcgtcgccgcctgtgctaaagaatttatctgtatcgctgatgaaagcaaatgggtcgacttattgggcacattccctttgccggttgaagtcattcccatggcccgttcatatgttgctagagagttggttgctttagggggcgacccggtttaccgccaaggcttcgtaaccgataacggtaatgtcattcttgatgtacacaatatgagtattcaaagcgccacggcattggaggagcgcattaataatattgtgggcgtggtcaccaatggtttatttgcttgtcgacctgctgatgttttattaatgggtacggcagatggtgtcaaaaccatcaaggctaagaactga

SEQ ID NO: 2981 - protein, 225 aa, Oceanobacter sp. RED65
MNQDQLKQAVGQAAVDYIKPHLQKDSIIGVGTGSTANCFIDALAELKNDFDGAVASSEATAERLKSHGIPVYDLNSSGTLDFYIDGADETNDHLQLIKGGGGALTREKIVAACAKEFICIADESKWVDLLGTFPLPVEVIPMARSYVARELVALGGDPVYRQGFVTDNGNVILDVHNMSIQSATALEERINNIVGVVTNGLFACRPADVLLMGTADGVKTIKAKN

SEQ ID NO: 2982 - DNA, 666 bp, Streptococcus pneumoniae TIGR4
  CDS (1)..(666): transl_table=11
atggcaggtatcacggctgctgaatttatcaaggatgggatggttgtagggctaggaacaggttctactgcctattattttgtcgaagaaatcggtcgtcgaatcaaggaagaaggcttgcagattacagctgtgacgacttctagtgtgaccagtaaacaggctgaagggctcaatatcccgctcaagtctattgaccaagtagactttgtcgatgtgacagtcgacggggcggatgaagtggatagtcagtttaatggaatcaaaggcggtggtggtgcccttctcatggaaaaggtggtcgcaacaccatcaaaagaatacatttgggtggtggatgaaagcaagctggtcgaaaaactaggtgcttttaaattgccagtagaagtggttcagtatggtgcagagcaggtctttcgtcattttgaacgagctggctacaaaccaagtttccgtgaaaaagacggccaacgttttgtgaccgatatgcagaattttatcattgacctcgccttggatgtcattgaaaatccaattgcttttggacaagaattggaccatgtcgttggtgttgtggagcatggtttattcaaccaaatggtggataaggtaatcgttgctggacgagatggagttcagatttcaacttcaaaaaaaggaaaatag

SEQ ID NO: 2983 - protein, 221 aa, Streptococcus pneumoniae TIGR4
MAGITAAEFIKDGMVVGLGTGSTAYYFVEEIGRRIKEEGLQITAVTTSSVTSKQAEGLNIPLKSIDQVDFVDVTVDGADEVDSQFNGIKGGGGALLMEKVVATPSKEYIWVVDESKLVEKLGAFKLPVEVVQYGAEQVFRHFERAGYKPSFREKDGQRFVTDMQNFIIDLALDVIENPIAFGQELDHVVGVVEHGLFNQMVDKVIVAGRDGVQISTSKKGK

SEQ ID NO: 2984 - DNA, 714 bp, Synechococcus sp. RS9916
  CDS (1)..(714): transl_table=11
gtggatcttcagacccagatgaagcatgcagtggcagcggccgctgtggatcagatcaaagacggcatggtgcttggactcgggtccggctcaacggccgctttgatgatccagggcctgggcgccaagctcgcaagcggtgagctcaaggacatcgtcggcgtgaccacgtcgttccaaggtgaggttcttgcagccgagctgaacattcccctgctcagcctcaacgcggtggatcgaatcgatctggcgattgatggtgctgatgaggttgatcctggatttcagctgatcaaagggggtggtgcctgtcacgtgcaggagaagctcgtggcggcacgggctgaacgcttcgtggtggtcgtggattccaccaagttggtcgatcgcctcaaccttggtttcctgctcccagtggaggtgcttcccggtgcctggcgtcaggttcagcagcagcttgcagccatgggtggcacggccgaactgcggatggctcagcgcaaggcagggcccgtggtcaccgaccagggaaatctcgttcttgacgtgaagatgaacggtggcatcgccgatcccgcagctctcgagctggccatcaacaacatccccggtgtgctggaaaacggtttgttcgtgaacctggccgacgaggtgctcgttggtgaggtcaatggtgatgtcgccggggtgcggagccttgagcgtcgcgcctga

SEQ ID NO: 2985 - protein, 237 aa, Synechococcus sp. RS9916
MDLQTQMKHAVAAAAVDQIKDGMVLGLGSGSTAALMIQGLGAKLASGELKDIVGVTTSFQGEVLAAELNIPLLSLNAVDRIDLAIDGADEVDPGFQLIKGGGACHVQEKLVAARAERFVVVVDSTKLVDRLNLGFLLPVEVLPGAWRQVQQQLAAMGGTAELRMAQRKAGPVVTDQGNLVLDVKMNGGIADPAALELAINNIPGVLENGLFVNLADEVLVGEVNGDVAGVRSLERRA

SEQ ID NO: 2986 - DNA, 657 bp, Vibrio sp. Ex25
  CDS (1)..(657): transl_table=11
atgactcaagatgaaatgaaaaaagcggctggttgggcagcactaaaatatgttgagaaaggcagcattgtcggtgttggtactggctctaccgtgaatcacttcatcgatgcactaggcactatcaaagacgatattaaaggtgcagtgtctagctctgtcgcttcaactgagcgccttaaagagcttggtattgaagtatacgagtgtaacgacgtaatgaagctggatgtgtatgttgatggcgcagacgaaattaacccagcacgtgaaatgatcaaaggcggcggcgcggctctgactcgtgagaaaattgtcgcagcaatctctgataagtttgtatgtattgttgacggcaccaaagcagttgacgtactaggtcagttcccactacctgtagaagtgatcccaatggcacgctcttacgttgcgcgcgaattagtaaaactgggcggtgacccggcttaccgtgaaggcgttgtgactgacaacggcaacgtaattttggatgtacacaacatgcagattactaacccgaaagaaatggaagacaagatcaacggtatcgcgggtgtggtgactgtgggtctttttgctcaccgtggtgctgacgtcgtaatcacaggtacaccagaaggcgcaaaaattgaagaataa

SEQ ID NO: 2987 - protein, 218 aa, Vibrio sp. Ex25
MTQDEMKKAAGWAALKYVEKGSIVGVGTGSTVNHFIDALGTIKDDIKGAVSSSVASTERLKELGIEVYECNDVMKLDVYVDGADEINPAREMIKGGGAALTREKIVAAISDKFVCIVDGTKAVDVLGQFPLPVEVIPMARSYVARELVKLGGDPAYREGVVTDNGNVILDVHNMQITNPKEMEDKINGIAGVVTVGLFAHRGADVVITGTPEGAKIEE

SEQ ID NO: 2988 - DNA, 654 bp, Alteromonadales bacterium TW-7
  CDS (1)..(654): transl_table=11
atgacacaagacgaattaaaaaaagcagcagcatgggctgcactcgagtttgtaaaagaaaacacgatagtaggtgtaggcacaggctcaaccgttaatcactttattgatgcccttggcacagttaaagacactttagtaggtgcagtatcaagctctgaagcttctacagcacgtttaaaagagctcggtattgaagtgtttgagctaaacgatatcgatgtactcgatgtttacatcgacggcgcggatgaaattaacgctcaaaacgaaatgattaaaggcggtggtgctgcacttacccgtgaaaaaatagtggctgcagttgctaagcagtttgtgtgtattgttgatgacaccaaactagtagacacattgggggaatttccgcttccagttgaagttattccaatggcgcgcagctacgtagcacgtgagttattaaagttaggcggcgacccagtctaccgccaaggtgtggttaccgataacggcaacgttattttagacgtatataatttaaatattaccaatgctaagcaacttgagacagatataaatcaaattgttggcgtagttaccaatggcctatttgcgatgcgtggtgctgataaagtaattatcggcactaaaaatgggcctcaaattaaatag

SEQ ID NO: 2989 - protein, 217 aa, Alteromonadales bacterium TW-7
MTQDELKKAAAWAALEFVKENTIVGVGTGSTVNHFIDALGTVKDTLVGAVSSSEASTARLKELGIEVFELNDIDVLDVYIDGADEINAQNEMIKGGGAALTREKIVAAVAKQFVCIVDDTKLVDTLGEFPLPVEVIPMARSYVARELLKLGGDPVYRQGVVTDNGNVILDVYNLNITNAKQLETDINQIVGVVTNGLFAMRGADKVIIGTKNGPQIK

SEQ ID NO: 2990 - DNA, 675 bp, marine gamma proteobacterium HTCC2143
  CDS (1)..(675): transl_table=11
atgacacaagatgacctaaaaaaagccgttgcacgcgcagcactggactatattaagcctaaaattgaaaacgatagtgtcatcggtatcggcactggatctaccgctaactacttcattgactatctagctgagattaaaagtcatattaatgccacggttgccagctctgaggcttcggcagacagactgagaaagcatggtatacctgtattcgaactaacctcagtcaacgaaattaccgtctatgttgatggtgccgatgagtcagatccaaatctggcactgataaaaggcgggggcgcggcactaacccgggaaaaaatcgtggctgcatctgctagagaatttgtctgtatagccgacgagagtaaatgtgtagcgcaactgggtaactttccactaccggtagaggtcatcccaatggcgcgttcttttgtcgccagagagttagtgaaaatgggcggtgatccagtttatcgagagggagtagtgactgacaacggcaatattatcatcgacgtcttcaacttcatgatacccaaccccatcgaaactgaacaacatatcaacaatattactggagttgtcactaatggtattttcgcccagcgaccagccgatattctgttggtagcaactagtgaaggtataaaaacgcttcacaaggcgtaa

SEQ ID NO: 2991 - protein, 224 aa, marine gamma proteobacterium HTCC2143
MTQDDLKKAVARAALDYIKPKIENDSVIGIGTGSTANYFIDYLAEIKSHINATVASSEASADRLRKHGIPVFELTSVNEITVYVDGADESDPNLALIKGGGAALTREKIVAASAREFVCIADESKCVAQLGNFPLPVEVIPMARSFVARELVKMGGDPVYREGVVTDNGNIIIDVFNFMIPNPIETEQHINNITGVVTNGIFAQRPADILLVATSEGIKTLHKA

SEQ ID NO: 2992 - DNA, 675 bp, Marinobacter sp. ELB17
  CDS (1)..(675): transl_table=11
atgaaccaggacgaactgaagcaagcggtcgccaaatccgctatcgactacatcagcccacgcctgaacagcagcagcgtaattggtgtgggcaccggcagcactgccaactgcttcattgattttctggcggccattcgcaacgattttgacggcgccgtggccagctccgaagccaccgctgaacgcttgaaaagccacggcattcccgtttatgagctgaacagcaccgccgatctggagttttatgtagacggcgccgatgaagtcaacgaacagctggaactgatcaaaggcggcggcggcgcgctaacgcgggaaaagattgtggctgaagtggcgcagacgtttatctgcatcgccgacgagtccaaaaaagtagacattctgggtgaattcccactgccactggaagtgttaccgatggcccgcagccacgttggccgggaaatcgtgaaacttggcggcgatccggtgtaccgcgacaattttaccaccgacaatggcaacatcattattgacgtctataacctggacctgtcgcgcccaattcaggtggaagaacgcctgaaccagattgtaggtgtggtcaccaacggcctgtttgcccgccgccccgccgatcttctgctgctgggcacaaaaaccggtgtacggactctcaagcgcggctga

SEQ ID NO: 2993 - protein, 224 aa, Marinobacter sp. ELB17
MNQDELKQAVAKSAIDYISPRLNSSSVIGVGTGSTANCFIDFLAAIRNDFDGAVASSEATAERLKSHGIPVYELNSTADLEFYVDGADEVNEQLELIKGGGGALTREKIVAEVAQTFICIADESKKVDILGEFPLPLEVLPMARSHVGREIVKLGGDPVYRDNFTTDNGNIIIDVYNLDLSRPIQVEERLNQIVGVVTNGLFARRPADLLLLGTKTGVRTLKRG

SEQ ID NO: 2994 - DNA, 657 bp, Moritella sp. PE36
  CDS (1)..(657): transl_table=11
atgactcaagatgaattaaaaaaagcagcaggctgggcagcattagaatatgttaaaaaagatagcatcgtcggtgtcggtaccggctcaaccgttaatcattttattgatgcattaggtactattcgcgaagacattaaaggtgccgtttcaagttctatcgaatcaactaagcgcttagaagcaatgggaattgaagtatttgatttaaacagtgtcccgcaccttgatatctatgttgatggggctgacgaaattgatagcaacaacaacatgatcaaaggtggtggcgcagcgctaacacgtgaaaagatcgttgctgcagtagcagaccaattcgtgtgtattattgatgatactaagaatgttgccgtattaggtgatttcccattacccgttgaagtgatcccaatggcccgctcttacgtgggtcgtgagttagttcaactcggtggtgatccggtttaccgtgaaggtgtcgtgactgataacggtaatattattctggatgtatacaacatgcagatcaccgatccgaaagcactagaaattgcaattaatggcttggtgggcgtagtaacaaatggtctattcgctgctcgcggcgcggacattgtgctaactggcacacaaaatggcgtgaaaacaactaagtaa

SEQ ID NO: 2995 - protein, 218 aa, Moritella sp. PE36
MTQDELKKAAGWAALEYVKKDSIVGVGTGSTVNHFIDALGTIREDIKGAVSSSIESTKRLEAMGIEVFDLNSVPHLDIYVDGADEIDSNNNMIKGGGAALTREKIVAAVADQFVCIIDDTKNVAVLGDFPLPVEVIPMARSYVGRELVQLGGDPVYREGVVTDNGNIILDVYNMQITDPKALEIAINGLVGVVTNGLFAARGADIVLTGTQNGVKTTK

SEQ ID NO: 2996 - DNA, 693 bp, Gemmata obscuriglobus UQM 2246
  CDS (1)..(693): transl_table=11
atgtccgcgggcactcccgacaccgacgccatcgccgcgaaggcggtcgaactcgttcagcccgacaccgtggtcggtctgggtacggggcgcgccgcgaccgcgttcattcaggcgctcggggccaaagtgcaggccgggctccgcatccgcgggttgcccacctcggaagtctccgccgaactcgccaccaaactgggcatccccctcgtgaccttcgatgacgtgccgtacatcgacgtgtgcgtggacggcgccgacgaagtcgacccgaacggcgacctcatcaagggctacggcggcgccctcgtgcgcgagaaggtcgttgcggcctacgcccgcacgttcgttgtgctcgcgggcggcgaaaaggttgtcaaggtgctcggcgaacgtggcaagcttcccgttgaagtcgtgacgttcgcactgaccccgtgccgcaagcgtctcgaaacgctgggtctcccgtccgcgctgcggatgaaagacgggaaaccattcgtcaccgataacgggaactacatcctcgactgccgcaccaccgccatcacggcccccgccgacacggaggcgcaaattctcgcgatccccggcgtcgtcgggacgggcatcttcgcgaagatggcccacaccatcatgattcaaggcaccgatgggagcgttgaagtgcgtgcgggtagcgcgaaataa

SEQ ID NO: 2997 - protein, 230 aa, Gemmata obscuriglobus UQM 2246
MSAGTPDTDAIAAKAVELVQPDTVVGLGTGRAATAFIQALGAKVQAGLRIRGLPTSEVSAELATKLGIPLVTFDDVPYIDVCVDGADEVDPNGDLIKGYGGALVREKVVAAYARTFVVLAGGEKVVKVLGERGKLPVEVVTFALTPCRKRLETLGLPSALRMKDGKPFVTDNGNYILDCRTTAITAPADTEAQILAIPGVVGTGIFAKMAHTIMIQGTDGSVEVRAGSAK

SEQ ID NO: 2998 - DNA, 663 bp, Thauera sp. MZ1T
  CDS (1)..(663): transl_table=11
atgacccaggacgaactcaagaaagccgccgcctacgccgctctcgaccacgtggtcgaaggcagcatcgtcggcgtcggcaccggctccaccgtcaaccacttcatcgatgcgctcgccggcatgcgcgatcgcatccgcggcgcggtctccagctccgaagcgagcacgcaacgcctgcgcgcgcacggcatcgaggtgttcgacctcgacggcatcgagtcgctgccggtgtatgtagacggcgccgacgagatcgacggcggcttcgcgatgatcaagggcggcggcggcgcactgacccgcgagaagatcgtcgccgcagtgtccgagcgcttcgtgtgcatctgcgacgcgagcaagaaggtcgaggtgctcggccgcttcccgctgccgatcgaggtgatcccgatggcccgcagccacgtcgcccgcgagctgcgcgcgctcggcggcgagcccaggctgcgcgagggcttcgtcaccgacaacggcaacctgatcctcgacgtgcatgggctgtcgatcaccgaccccgtcaccatcgagatgcggatcaaccagatcgtcggtgtggtcaccaacgggctcttcgccgtgcgcggcgccgacgtgctgctgctcgccgcccccggcggcgtgcaacggctggacgcacggtga

SEQ ID NO: 2999 - protein, 220 aa, Thauera sp. MZ1T
MTQDELKKAAAYAALDHVVEGSIVGVGTGSTVNHFIDALAGMRDRIRGAVSSSEASTQRLRAHGIEVFDLDGIESLPVYVDGADEIDGGFAMIKGGGGALTREKIVAAVSERFVCICDASKKVEVLGRFPLPIEVIPMARSHVARELRALGGEPRLREGFVTDNGNLILDVHGLSITDPVTIEMRINQIVGVVTNGLFAVRGADVLLLAAPGGVQRLDAR

SEQ ID NO: 3000 - DNA, 714 bp, Cyanothece sp. PCC 8801
  CDS (1)..(714): transl_table=11
atgacaatgacaaatgatcccgtagtgatcatgaaacaagaggtgggtaaggcggccgcgtctcgggtcaaatcggattcgattgttggcttagggacgggatcaaccacagcctatgccattgagtatattggggaacggctcaagtcaggcgacttaaagaatattgttggcgtgacaacctcttttcaagcagaagtcttggctagaaagtatggtattcctttaacgacccttgatgtcattgatcgtatcgatgtggctattgatggagccgatgaagttgatcctaacaaaaatttaattaagggaggtggggctgcccatacccaagaaaaaattgttgatagcttagctgaagtctttattgtcgttgtcgatagtaataaattggtggataagttggggtcaacgttcttgttacccgtcgaagtgatccccaaagcagttacccctgtgatgcgtcaattggaacaattgggaggaaaaccagaattacgcatgggagtgagaaaagccggtcccgtggtgacagatcagggcaatctggtgattgatgtcaaatttgaaggcattgatgatccagccaccctagaaaaaaccattaacaatattccaggggttctcgaaaacggcttgtttgtgggagtgaccgatattgtcttagtgggcgaaattatcgatggtaagccctctgtacgggaaatttgctaa

SEQ ID NO: 3001 - protein, 237 aa, Cyanothece sp. PCC 8801
MTMTNDPVVIMKQEVGKAAASRVKSDSIVGLGTGSTTAYAIEYIGERLKSGDLKNIVGVTTSFQAEVLARKYGIPLTTLDVIDRIDVAIDGADEVDPNKNLIKGGGAAHTQEKIVDSLAEVFIVVVDSNKLVDKLGSTFLLPVEVIPKAVTPVMRQLEQLGGKPELRMGVRKAGPVVTDQGNLVIDVKFEGIDDPATLEKTINNIPGVLENGLFVGVTDIVLVGEIIDGKPSVREIC

SEQ ID NO: 3002 - DNA, 714 bp, Cyanothece sp. PCC 7424
  CDS (1)..(714): transl_table=11
atgacagtaaccaacgatcctgtcgttttaatgaaacaagaagtcggcaaagcagccgcccagcgagttcactcggatacaatcataggattagggacgggatcaaccacagcttatgccattcagtatattggggaacgtatccagactggagagcttaaaaatgtggtgggtgttcccacctcttttggagcagaagtgttagccagaaaatatggagttcctttaacgactctcgatgtcattgataaaatggatctagctattgacggagcagatgaagtcgatcctcaaaaaaatttaattaaagggggcggtgcagcacacacccgtgagaaaatagttgatagtttggcagatgtatttatcgtcgttgtcgatagtggcaaattggtagataaattaggctctacttttttgttgccggttgaagtcattccgatggctgtaactccggttattaaagcgttagaaaagctaggaggcaaaactgatctgcgaatgggagtcaaaaaagccggcccagtcgtgaccgatcaaggtaatttagtgattgatgttaaatttgacaatatagaagatcctgcaaatttagaaaagacgattaataatattccaggggttttagaaaatggtctatttgtaggagttgctgatcttattttagtgggtgaaattatagacgggaaaccccgtgtcagagaaatttcttaa

SEQ ID NO: 3003 - protein, 237 aa, Cyanothece sp. PCC 7424
MTVTNDPVVLMKQEVGKAAAQRVHSDTIIGLGTGSTTAYAIQYIGERIQTGELKNVVGVPTSFGAEVLARKYGVPLTTLDVIDKMDLAIDGADEVDPQKNLIKGGGAAHTREKIVDSLADVFIVVVDSGKLVDKLGSTFLLPVEVIPMAVTPVIKALEKLGGKTDLRMGVKKAGPVVTDQGNLVIDVKFDNIEDPANLEKTINNIPGVLENGLFVGVADLILVGEIIDGKPRVREIS

SEQ ID NO: 3004 - DNA, 1134 bp, Oryza sativa subsp
  CDS (1)..(1134)
atggccgccgccaccgtctccgtccgcttccacccggccgcatccgccgcgcgctgcggcggcggctcgcgccggagcaggcgcctgtccggggtcatcagggcgcagtcggcgccggcttcggcggcggcggcggcgctgacgcaggacgacctgaagaggctggcggcggtgcgcgcggtggagcaggtggagagcgggatggtgctggggctggggaccgggtcgacggcggccttcgccgtcgcggagatcggggcgctgctggcgtccgggaagctgagcggcatcgtcggggtgcccacctccaagcgcacgttcgagcaggcgcagtcgctcggcatcccgctctccaccctcgacgaccacccccgcatcgacctcgccatcgacggcgccgacgaggtcgatccagaccttaaccttgtgaaagggagaggtggtgcccttctccgggagaagatggttgaggcagcatcagacaagttcatcgttgttgttgacgagacaaagctagttaccggcttaggagggagtggtctagccatgcctgtggaggttgtgcagttctgctggaagtacaaccaagtgagattgcaggatctgtttaacgatgaaggatgcgaggcgaagctgagattggatgaaggcggcaaaccctacgttaccgacaactcaaactacatcgttgatttatacttcaagacgccgatcaaggatgcgttggcagcagggaaggagatctcagctttggaaggcgtcgttgagcatgggctgttcctggacatggcgacttcggtgatcatcgctggaacagatggcacgccgatcaaggatgcgttggcagcagggaaggagatctcagctttggaaggcgtccttgagcatgggctgttcctggacatggcgacattcggtgatcatgcgctggaacagatggcgtcagtgtctaaaacaaacgtttgtctgctctccaaagactatctcagagttgcctcctgccgtcttgcacgatttgttggtcaagagacagcccgacagcctgcatttcctcgattggctcgaaacgtatttggctgtgttttgctgcttgtcacactattcacatctaagtttgtaaagcaaaggatgtaa

SEQ ID NO: 3005 - protein, 377 aa, Oryza sativa subsp
MAAATVSVRFHPAASAARCGGGSRRSRRLSGVIRAQSAPASAAAAALTQDDLKRLAAVRAVEQVESGMVLGLGTGSTAAFAVAEIGALLASGKLSGIVGVPTSKRTFEQAQSLGIPLSTLDDHPRIDLAIDGADEVDPDLNLVKGRGGALLREKMVEAASDKFIVVVDETKLVTGLGGSGLAMPVEVVQFCWKYNQVRLQDLFNDEGCEAKLRLDEGGKPYVTDNSNYIVDLYFKTPIKDALAAGKEISALEGVVEHGLFLDMATSVIIAGTDGTPIKDALAAGKEISALEGVLEHGLFLDMATFGDHALEQMASVSKTNVCLLSKDYLRVASCRLARFVGQETARQPAFPRLARNVFGCVLLLVTLFTSKFVKQRM

SEQ ID NO: 3006 - DNA, 684 bp, Lactobacillus reuteri
  CDS (1)..(684): transl_table=11
atggatcaaaatgcattaaaagaacaaacaggtaaggaatcagttaagtacattaaatctgggatgattgtcggtctcggaactggatcgactgttaaatatatggttgatgagcttggtaagcaagtccaagaaggtaaaatcaaagatatcatcggtgtaacgacttcaaaccgaactgctaaacaagcacgcgacctcggaattacaattaaagatattgatgacgttgaccacatcgatttaactattgacggggcagatgaaatcagtgatgacttccaaggaatcaaaggtggcggtggcgccctcctttgggaaaagatcgttgccaatgcctcaaataaagtaatgtggattgtcgatgaaagcaaactcgtccacaaacttggcgctttcccccttcctgttgaagtaattccattcggttctcaacatgtctttgaccgtcttgaaaagaaaggctacaagccaacttggcggatggatggagataaaaagttccgtactgatgaaaataactatattattgaccttcatcttggcgaaattgatgatcctaaggccttagctgacgaattgatccacatggttggaattgttgaaactggtttattcttaaatcgagttaacgacgtaattgttggtacttcagaaggtccaaaggtattgcacgctcgttaa

SEQ ID NO: 3007 - protein, 227 aa, Lactobacillus reuteri
MDQNALKEQTGKESVKYIKSGMIVGLGTGSTVKYMVDELGKQVQEGKIKDIIGVTTSNRTAKQARDLGITIKDIDDVDHIDLTIDGADEISDDFQGIKGGGGALLWEKIVANASNKVMWIVDESKLVHKLGAFPLPVEVIPFGSQHVFDRLEKKGYKPTWRMDGDKKFRTDENNYIIDLHLGEIDDPKALADELIHMVGIVETGLFLNRVNDVIVGTSEGPKVLHAR

SEQ ID NO: 3008 - DNA, 960 bp, Vitis vinifera
  CDS (1)..(960)
atggctattgcttatcctcattttattgggtctcagaaatctgcaatggagacggggatgatatcatctccgtcttcgtcttctccatctcggcctcctgtgatccttacccaagatgagttgaagaaaatcgcggcgtacaaagctgtggaatacgttgagtccggtatggttctcgggctcggaaccgggtcaacggcgaagcacgccgtggaccgcataggcgagcttttgcggcaagggaagttgaagaacattgtgggaatacccacatcgaagatgacccacgaacaagcggtttcgttggggattccattgtcggatctggattcttatccgattttggatcttgctattgatggtgcggatgaagtcgacccgtatttgaatttggtgaagggtcggggcgggtcactgctgagggagaagatggtggagggtgcttgtaagaaattcgttgtgattgttgatgagtccaaattagttaactatttgggaggcagtggtctcgctatgccggttgagattgtgccgttttgttggaaatttactgcccaaaggttgcaaatgttgtttgaggaatctggttgtgtcgcaaagcttaggacttaccagaatggagaaccttttgttacagataatatgaattacattgtggacttgtatttcaaaagggaaattggggatttgaaggttgcgagtgatgcaattctgagacttgctggtgtcgttgagcatggaatgtttattgatatggcaaccactcttattgttgcaggggagtgtggtgtcattggctgctccttacactcctctaacagttctggcagttctagcttgactacttactttggtggtggctatcttctttggttgcctgtgggcttttttgctgatttaattggtgccactgttggtgcaggtgctgcagttcttcttggcagaacagcaaatgcctga

SEQ ID NO: 3009 - protein, 319 aa, Vitis vinifera
MAIAYPHFIGSQKSAMETGMISSPSSSSPSRPPVILTQDELKKIAAYKAVEYVESGMVLGLGTGSTAKHAVDRIGELLRQGKLKNIVGIPTSKMTHEQAVSLGIPLSDLDSYPILDLAIDGADEVDPYLNLVKGRGGSLLREKMVEGACKKFVVIVDESKLVNYLGGSGLAMPVEIVPFCWKFTAQRLQMLFEESGCVAKLRTYQNGEPFVTDNMNYIVDLYFKREIGDLKVASDAILRLAGVVEHGMFIDMATTLIVAGECGVIGCSLHSSNSSGSSSLTTYFGGGYLLWLPVGFFADLIGATVGAGAAVLLGRTANA

SEQ ID NO: 3010 - DNA, 852 bp, Vitis vinifera
  CDS (1)..(852)
atggccaccctatccctcctctctccacccaagtcccactccctctcctccctccaccaccgtaatgccctttccctccgcacctcctccacccttaccccccgcacccgcccccttctctctatcagagccttctctgcacctgccctcacccaagacgacctcaagaagctcgccgctgataaggccgtagactacgtcaaaagcggcatggtcctcggcctcggcaccggctccaccgccgcctttgtcgtcgccaagctcggccacctcctcaaaaccggccaactctctgacatcgtcggcgttcccacttccaagcgcaccgaagagcaagccctctctctcggcatccctctctccgtgctcgaccaccaccccagcattgacctcgccatcgacggcgctgacgaggtggacccggatctcaacctcgtcaagggacgcggcggcgccctcctccgcgagaaaatggtggaggccgcctcggataagtttgttgtggtggtggatgacaccaaattggttaatggccttggtgggagcggcttagcaatgccagttgaagttgtgcagttttgctggaaatacaatttggttaggttgcaggagctgtttaaggaagaggggtgtgaagcgaagctgagattgaacccggatgggaagccctatgtgaccgataattcaaattacatagtggatttgtatttcaagacgccgataaaagactcaattgcggcagggaaggagatttcatcctttgaaggggtggtggagcacgggttgtttctggacatggccactgcagtgattattgctgggaaggatggagtgacagtgaagaccaagtga

SEQ ID NO: 3011 - protein, 283 aa, Vitis vinifera
MATLSLLSPPKSHSLSSLHHRNALSLRTSSTLTPRTRPLLSIRAFSAPALTQDDLKKLAADKAVDYVKSGMVLGLGTGSTAAFVVAKLGHLLKTGQLSDIVGVPTSKRTEEQALSLGIPLSVLDHHPSIDLAIDGADEVDPDLNLVKGRGGALLREKMVEAASDKFVVVVDDTKLVNGLGGSGLAMPVEVVQFCWKYNLVRLQELFKEEGCEAKLRLNPDGKPYVTDNSNYIVDLYFKTPIKDSIAAGKEISSFEGVVEHGLFLDMATAVIIAGKDGVTVKTK

SEQ ID NO: 3012 - DNA, 852 bp, Treponema paraluiscuniculi
  CDS (1)..(852): transl_table=11
gtgcgcaaccctcagctggcacaatgcagatattcttttgcaccacaaaaaggacacagacgcgtgagtgcacttgtggaaaaagctatacacgagaggaacacgacgacgaacaccccattagacgttaccgcgcagaaattgctggttgcccagcgcagcgtggacaccctcgttcaagagggggtgctgcacgcgcacatgagtattggccttgggacaggctctacggcaatgcctgcggtaaaacgcatcgcagatcaccttgcacgcggcactctctctgacatagcggcagtgcccactagttttcaaacagcgctcatatgtgagcggtacaacatcccccttttttctctcagttcaaaacgggttgggggcaaactggatgtgactatcgacggcgcggacgaaattgacacccaaaattttgtcatcaaaggcggtggagctgcgcttttgcaagaaaagatcgctgcatacaacagcgcgcactttgttatcatcgtagacgaaacaaaggtggtagaaaccttaggcacgcgcgcagcgctccctatcgaagtggtgcctgaggcccgcatgagcgtgatgcgcacgcttcaggattgggggttgtccgtgcacatacgcgaagcggtgagaaaaaaaggaccggtggtgactgaccacggaaattttattttagacgcgcggtggcaatcgctcccgacgcgcaccccgcaagacatggaacgcgcgctcaatgcactgccaggggtcattgaaaacggcttgttcaccgagcgaaccgtacgcgtctttgttgcgcacgcagacggttcggtagaggagcgctcggcctctttctaa

SEQ ID NO: 3013 - protein, 283 aa, Treponema paraluiscuniculi
MRNPQLAQCRYSFAPQKGHRRVSALVEKAIHERNTTTNTPLDVTAQKLLVAQRSVDTLVQEGVLHAHMSIGLGTGSTAMPAVKRIADHLARGTLSDIAAVPTSFQTALICERYNIPLFSLSSKRVGGKLDVTIDGADEIDTQNFVIKGGGAALLQEKIAAYNSAHFVIIVDETKVVETLGTRAALPIEVVPEARMSVMRTLQDWGLSVHIREAVRKKGPVVTDHGNFILDARWQSLPTRTPQDMERALNALPGVIENGLFTERTVRVFVAHADGSVEERSASF

SEQ ID NO: 3014 - DNA, 711 bp, Microcystis aeruginosa PCC 7806
  CDS (1)..(711): transl_table=11
atgacagcaatcgatccagtcattatcatgaaacaggaggtcggtaaggccgccgctaatctagttcaatctaattcggtcgtgggattgggaactggttcaacgacggcctacgcgatcgaatatctcggtgctagactgcaaagcggggaaatcagcaatattgtcggggttcccacttcttttcaagcgcaggttttggcgaggaagtacggaattcccctcactaccctcgatgtcatcgtgaagatggatatcgctatcgatggggccgatgaggtggatccccagaaaaacctgattaaaggtggcggtgctgcccatactcaggagaaaattgtcgatagtctcgccgatattttcgtcgtggtggtggatggcaataagctggtggataagttgggatcgacttttcttttgccggtggaagtgttacccatggccatgactccggtgatgctgaaattagaggccctcggtggtaaaccttccctgcgcatgggagtgaaaaaagccggccccgtggtgacagatcaaggcaatttagttatcgatgttaaatttgatagtatcgatgatccggctgatttggaaagaactattaataatatgccgggggttttagaaaatggtttatttgtcggggttgctgatctgattctcgtcggtgaaattatcgacggtaagccggtagtccgcgagattaagtag

SEQ ID NO: 3015 - protein, 236 aa, Microcystis aeruginosa PCC 7806
MTAIDPVIIMKQEVGKAAANLVQSNSVVGLGTGSTTAYAIEYLGARLQSGEISNIVGVPTSFQAQVLARKYGIPLTTLDVIVKMDIAIDGADEVDPQKNLIKGGGAAHTQEKIVDSLADIFVVVVDGNKLVDKLGSTFLLPVEVLPMAMTPVMLKLEALGGKPSLRMGVKKAGPVVTDQGNLVIDVKFDSIDDPADLERTINNMPGVLENGLFVGVADLILVGEIIDGKPVVREIK

SEQ ID NO: 3016 - DNA, 888 bp, Picea sitchensis
  CDS (1)..(888)
atggccatgccgattgcagcgggcgctgcactttccacgctaccctcgctctcctcctcctgctcagaattgaataaatggaagcctttgaattcaaatacccatttccacttcaattgcaacaggagcctaaacaccgccagattatcagtgagagctatgtcctcgtcgaccagcgtcctgacgcaggatcagctgaagaaattggccgcagagaaagctgtggaatatgtggagagcgggatggtgttgggtttgggcacgggctccaccgctgcctttgccgtggccagaatcggggagctcatgaaggctggggagctgaaggacatcgtgggcgtccccacctccaagcgcaccgccgagcaggccgagtctctgggcattccactctcggtgcttgacgagcaccccaaaatcgacctcgccatcgacggcgccgacgaggtcgacccggagctcaatcttgtcaagggccgcggcggcgcattgctccgagagaagatggtggaggccgcctccgccaagttcgtggtcatcgtcgacgaatcgaagcttgttaatggcctcggcggcagcgggctggcgatgcccgtggaggtggtgcccttctgctggaagtacaacgcgtcgaggctgcagtcgctctttcaggccgagggctgcgaggcgaagctcaggatggacggtgacggggacaagccctacattacggataacgccaattacatcgtggatttgtatttcaagactccgatcaaggattcgagggccgcggccaaagccattctgggtttcgagggcgtggtcgagcacgggctcttcttggacatggccacggctgtcatcattgctggggctgaaggcgttagagtcacgaccaagtga

SEQ ID NO: 3017 - protein, 295 aa, Picea sitchensis
MAMPIAAGAALSTLPSLSSSCSELNKWKPLNSNTHFHFNCNRSLNTARLSVRAMSSSTSVLTQDQLKKLAAEKAVEYVESGMVLGLGTGSTAAFAVARIGELMKAGELKDIVGVPTSKRTAEQAESLGIPLSVLDEHPKIDLAIDGADEVDPELNLVKGRGGALLREKMVEAASAKFVVIVDESKLVNGLGGSGLAMPVEVVPFCWKYNASRLQSLFQAEGCEAKLRMDGDGDKPYITDNANYIVDLYFKTPIKDSRAAAKAILGFEGVVEHGLFLDMATAVIIAGAEGVRVTTK

SEQ ID NO: 3018 - DNA, 795 bp, Populus trichocarpa
  CDS (1)..(795)
atggctataccttgtccaccctttattggatcagaaaagctatctatagagtcaggagctatgtctccttcatctccttccccgttaatcctaacccaagacgagctcaaaaaaatcgccgcctataaagccgtcgagtttgtccaatctggcatggtcctcggcttaggcactggctctaccgctaaacacgccgtcgaccgtatcgccgatctcttacaccaaggaaaattaaagaacattataggaatacctacctccacaaaaacccaccaacaagccgtgtctcttggcatccctttatccgatcttgattcgcatcccgtcgttgatcttgccatcgacggtgctgatgaggtggactcgaatctcaatttggtcaaggggcgtggtggatctttgctcagagagaagatgattgagagtgcctgcaagaagttcattgttattgttgaccagtctaagttggtggctcatgttggtgctagtggtgctatgcccgttgaagttgtgccgttttgttggaaattttctcaagataggctgcaaaatttgttcgattacgcggggtgcgttgccaaattgaggaccgataatgggggcgaaaagatttttgttactgataatgggaattatatcgtggatttgttttttaagaaggatattggggatttaaaggttgctagtgatgctattttgaggctagctggggttgttgagcatgggatgtttcttgatatggcaaccactgttattgttgcaggtgagcttgggatcactatcaaggataagtag

SEQ ID NO: 3019 - protein, 264 aa, Populus trichocarpa
MAIPCPPFIGSEKLSIESGAMSPSSPSPLILTQDELKKIAAYKAVEFVQSGMVLGLGTGSTAKHAVDRIADLLHQGKLKNIIGIPTSTKTHQQAVSLGIPLSDLDSHPVVDLAIDGADEVDSNLNLVKGRGGSLLREKMIESACKKFIVIVDQSKLVAHVGASGAMPVEVVPFCWKFSQDRLQNLFDYAGCVAKLRTDNGGEKIFVTDNGNYIVDLFFKKDIGDLKVASDAILRLAGVVEHGMFLDMATTVIVAGELGITIKDK

SEQ ID NO: 3020 - DNA, 897 bp, Ostreococcus tauri
  CDS (1)..(897)
atgcgcgcgacgtcgtcggtgacgcgcggtacgttcgtcccgcgcgcgcgaacgctcggaaagggtcgtggaggcgcgcgtcggacgcgatcgcgggtgatgtcgacgcgggcggcgatgacgcaggatgaattaaaaaagctcgtcggatataaatccgtggacgatcacgtcgagagcggtatggtggtcggtctcggtacgggatcgacggcgtacttcgcggtcgagcgcgtcgggcaaaagctggcgagcggggagctgaagaatgtgatctgcatcccgacgagcgagcgcacgcgcgagcaggcggaatcgctgaagattccgttgtgcacgctgaacgagaagtcggaactcgatgtcgcgatcgatggcgcggatgaggtggatccggcgttggcgttggtcaagggcggcggcggcgcgctgttgcgcgagaagatggtggaggtgatggcgaagaagtttgtcgtcatcgtcgacgagtccaagctctgcaagggactcggaccgggattcccgttgccggtggagatcacgccgttctgccacatgcacacgctgcgtacgatcgcaaagttgcccgcgctcgcgggttgcgaggccatcctccgcatgggatcctcgtcgaacaacaagatcgacggcgataacatcgcggttacggataacggcaactacatcgtcgacttgcacttcaagtccccgatcaaggatccggtcgcggccgcgagccagctcaagaactgcgtcggcgtcgttgatcacggtttgttcgtcgacatggcttaccaagtcatcgttgcgggcagcgatggcatccgcgtcgccggcacggatggcgagaagccgtggtgtttattaatacgaaataacgatgaatccacatcatag

SEQ ID NO: 3021 - protein, 298 aa, Ostreococcus tauri
MRATSSVTRGTFVPRARTLGKGRGGARRTRSRVMSTRAAMTQDELKKLVGYKSVDDHVESGMVVGLGTGSTAYFAVERVGQKLASGELKNVICIPTSERTREQAESLKIPLCTLNEKSELDVAIDGADEVDPALALVKGGGGALLREKMVEVMAKKFVVIVDESKLCKGLGPGFPLPVEITPFCHMHTLRTIAKLPALAGCEAILRMGSSSNNKIDGDNIAVTDNGNYIVDLHFKSPIKDPVAAASQLKNCVGVVDHGLFVDMAYQVIVAGSDGIRVAGTDGEKPWCLLIRNNDESTS

SEQ ID NO: 3022 - DNA, 672 bp, Unknown
  uncultured bacterium
  CDS (1)..(672): transl_table=11
atgacgcaagacgaaatgaaaaccctggtgggcctggcggccctggaccatgtgcaagccggcagcatcgtgggcgtgggcaccggctcgacggtggacaagttcatcgatgcgctgggcgccgcgctcaagaccgatccgcaacgcgtggtcggcgccgtgtccagctcggtgcgcagcacggagcgcctgcaatccctgggcgtgaaggtgctgccggccgaatcggtcagccgcctggcggtctacatcgacggcgccgacgagatcaaccaccagggcgacatgatcaagggtgggggcgctgccttgacccgcgaaaagatcgtggccgacctggccgagcgtttcgtgtgcatcgccgacgagaccaagctggtgcagaccctgggcaagttcccgctgcctgtcgaggtgatcccgatggcggccgcccaggtcatccgggcgtttgccgcccagggtggccaagccagggtgcgcgaaggcgtggtcaccgacaacggcaacctgatcgtggacgtgaccggcttgtcgatcaccgacccggcccggttggaatcagacgtgaaccaatggccgggcgtggtcaccgtgggcatctttgcccgcaaccgcgcctcggtgtgcctgttgggcacgccgaacggggtcaagaccctgaacttttaa

SEQ ID NO: 3023 - protein, 223 aa, Unknown
  uncultured bacterium
MTQDEMKTLVGLAALDHVQAGSIVGVGTGSTVDKFIDALGAALKTDPQRVVGAVSSSVRSTERLQSLGVKVLPAESVSRLAVYIDGADEINHQGDMIKGGGAALTREKIVADLAERFVCIADETKLVQTLGKFPLPVEVIPMAAAQVIRAFAAQGGQARVREGVVTDNGNLIVDVTGLSITDPARLESDVNQWPGVVTVGIFARNRASVCLLGTPNGVKTLNF

SEQ ID NO: 3024 - DNA, 777 bp, Oryza sativa subsp
  CDS (1)..(777)
atggccgccgccaccgtctccgtccgcttccacccggccgcatccgccgcgcgttcggcggcggcggcggcgctgacgcaggacgacctgaagaggctggcggcggtgcgcgcggtggagcaggtggagagcgggatggtgctggggctggggaccgggtcgacggcggccttcgccgtcgcggagatcggggcgctgctggcgtccgggaagctgagcggcatcgtcggggtgcccacctccaagcgcacgttcgagcaggcgcagtcgctcggcatcccgctctccaccctcgacgaccacccccgcatcgacctcgccatcgacggcgccgacgaggtcgatccagaccttaaccttgtgaaagggagaggtggtgcccttctccgggagaagatggttgaggcagcatcagacaagttcatcgttgttgttgacgagacaaagctagttaccggcttaggagggagtggtctagccatgcctgtggaggttgtgcagttctgctggaagtacaaccaagtgagattgcaggatctgtttaacgatgaaggatgcgaggcgaagctgagattggatgaaggcggcaaaccctacgttaccgacaactcaaactacatcgttgatttatacttcaagacgccgatcaaggatgcgttggcagcagggaaggagatctcagctttggaaggcgtcgttgagcatgggctgttcctggacatggcgacttcggtgatcatcgctggaacagatggcgtcagtgtcaaaacaaagtga

SEQ ID NO: 3025 - protein, 258 aa, Oryza sativa subsp
MAAATVSVRFHPAASAARSAAAAALTQDDLKRLAAVRAVEQVESGMVLGLGTGSTAAFAVAEIGALLASGKLSGIVGVPTSKRTFEQAQSLGIPLSTLDDHPRIDLAIDGADEVDPDLNLVKGRGGALLREKMVEAASDKFIVVVDETKLVTGLGGSGLAMPVEVVQFCWKYNQVRLQDLFNDEGCEAKLRLDEGGKPYVTDNSNYIVDLYFKTPIKDALAAGKEISALEGVVEHGLFLDMATSVIIAGTDGVSVKTK

SEQ ID NO: 3026 - DNA, 681 bp, Thermoproteus tenax
  CDS (1)..(681): transl_table=11
atgaagcacttactagcgcgtaaagcagcggagtatataagggaggggagcatagtcggcttgggctctggctccacggctaaggcgtttatagaggagctggcgaagagagtgcgcgaggatggcctcaccgtgactctcgtgtccacgagcgtagacagcgagttaaaggccgcagaggtcgggttggataaatatcttgccccactatgggccgtcgataggatcgatatagccgtcgacggcgcggatgagctgaccagagataggctcttcctcaaggggggtggcggcgctatgttccgcgaaaaggtggtggactatagagcatccacgttgataataatagcggagtcgcacaagcttgtggacaggataccggcgcgacatccaatccctattgaggtgcttccggcggcttggagacttgtggcagacgatattgtgaagaggtggggagggaaggctgtgctgagggtgtgccagtgcgggggaaagctgggccccctcgtgacagacaacgggaactatatactcgattgggcccctcctggccccatcgatcccgctctggaggacgaacttagggggatacctggcgtcatagagagcggtatattctcaaagagacgcgacgcggtagtgttgttggccgatgagcggggagtcttcgagctatag

SEQ ID NO: 3027 - protein, 226 aa, Thermoproteus tenax
MKHLLARKAAEYIREGSIVGLGSGSTAKAFIEELAKRVREDGLTVTLVSTSVDSELKAAEVGLDKYLAPLWAVDRIDIAVDGADELTRDRLFLKGGGGAMFREKVVDYRASTLIIIAESHKLVDRIPARHPIPIEVLPAAWRLVADDIVKRWGGKAVLRVCQCGGKLGPLVTDNGNYILDWAPPGPIDPALEDELRGIPGVIESGIFSKRRDAVVLLADERGVFEL

SEQ ID NO: 3028 - DNA, 831 bp, Arabidopsis thaliana
  CDS (1)..(831)
atggcttccttatccttcgtttcctcttctcaccttacgctacgcactccttctattgccctacgcagcactggctcttctcctcgaacctccgtttcattctccgtcaaggctcaatccgtcgcgctttcacaggacgatttgaagaagctcgcggcggagaaagctgtggaggcaattaaacctgggatggttctagggctcggaaccggatccaccgcagctttcgctgttgatcagatcgggaaactactctcttccggtgaactctacgatattgtcggtatcccaacgtcgaaacgaacggaggaacaagcacggtcgttagggattcctcttgttgggttagatacacatccgagaatcgatctcgctattgacggagcagacgaggtagatccgaatcttgatttagtcaaaggtcgtggaggtgctcttctccgtgagaaaatggtggaagctgtggctgacaagtttattgttgtggctgatgataccaaactcgttacaggactcggtggaagtggattagctatgccggtggaagttgttcaattctgctggaactttaatttgattagattgcaagagctcttcaaggaatttggatgtgaatcaaagcttagagttgatggtgatggcaagccttatgtgactgataacagtaattacattattgatttgtattttaagactcctttgaaggatggattcgctgcggctaaagagattgggaagtttcaaggagtggtggagcatggtctgtttctcggaatggctacttctgtcattatcgctggaaagaatggcgttgaagttatgaccaagtga

SEQ ID NO: 3029 - protein, 276 aa, Arabidopsis thaliana
MASLSFVSSSHLTLRTPSIALRSTGSSPRTSVSFSVKAQSVALSQDDLKKLAAEKAVEAIKPGMVLGLGTGSTAAFAVDQIGKLLSSGELYDIVGIPTSKRTEEQARSLGIPLVGLDTHPRIDLAIDGADEVDPNLDLVKGRGGALLREKMVEAVADKFIVVADDTKLVTGLGGSGLAMPVEVVQFCWNFNLIRLQELFKEFGCESKLRVDGDGKPYVTDNSNYIIDLYFKTPLKDGFAAAKEIGKFQGVVEHGLFLGMATSVIIAGKNGVEVMTK

SEQ ID NO: 3030 - DNA, 804 bp, Arabidopsis thaliana
  CDS (1)..(804)
atgggttctgcattcgatccccttgtcacggccactgaggatctcgccgccgtcaactcggcgccgccactctcaaacctcacgcaagaagaactcaagaaaatcgccgcttataaagccgtcgaattcgtcgaatctggaatggttatcggtctcggcactggctccaccgcgaaacacgccgtggctcgtatcagcgagcttctccgagaaggaaaactcaaggatataatcggaatccctacttcaaccacaacgcatgagcaagcggtgtctctagggataccattatccgatctagattcgcatccggtggtggatctatcaatcgatggcgccgacgaagtcgatccggctcttaatctggtgaaaggacgcggcggatcgttattgagagagaagatgattgaaggagcatctaagaagttcgttgtgattgttgatgaatcgaagcttgtcaagtatatcggaggaagcggactcgctgttccggtggaggttgttccgttctgctgcgatttcacaagggggaaactggaagagctatttagagattcgggatgtgttgcgaagctgaggatgaaaatcggatctaacggcgaagaggcggcgccggctgtgacggataatgggaattatgtggtggatttgtatttggagagagatattggagatttagaggtggcgagtgaggcgatattgaggtttcctggagtagtggagcatgggatgtttctgggaatggcgactacgttgatcgtcgccggaaaatttggtgttaccgtcaaggataggtttggataa

SEQ ID NO: 3031 - protein, 267 aa, Arabidopsis thaliana
MGSAFDPLVTATEDLAAVNSAPPLSNLTQEELKKIAAYKAVEFVESGMVIGLGTGSTAKHAVARISELLREGKLKDIIGIPTSTTTHEQAVSLGIPLSDLDSHPVVDLSIDGADEVDPALNLVKGRGGSLLREKMIEGASKKFVVIVDESKLVKYIGGSGLAVPVEVVPFCCDFTRGKLEELFRDSGCVAKLRMKIGSNGEEAAPAVTDNGNYVVDLYLERDIGDLEVASEAILRFPGVVEHGMFLGMATTLIVAGKFGVTVKDRFG

SEQ ID NO: 3032 - DNA, 870 bp, Spinacia oleracea
  CDS (1)..(870)
atggcttccgccgctttctctctcctcccctccacctcctccaccacctttaaccgccatgccaccaccaaactcctcaacctcaaattcctccacaaccaccgtaacaaacccttcttcaccaccacaatcaaatctctctcttctccctccccaacaccagtcttaactcaagacgatctcaagaaactcgccgccgaaaaagccgtcgactccgtcaaatccggcatggttctcggtctcggaaccggaagtactgccgcatttgctgtctcgcgaatcggcgagcttctctctgccggaaaactgaccaacatcgttggaattcctacctcgaagcggaccgcagagcaggcggcgtctcttggaattccgctctccgttctcgatgatcatcctcgaattgacctcgccattgatggcgccgatgaggttgatcctgatcttaatctggttaaggggcgcggtggggcgctcttgagagaaaagatggttgaagctgctagtgataaatttattgttgttgttgatgatactaagcttgttgatggtttgggtggtagtcgtcttgctatgcctgttgaagttgttcaattttgctggaaatataatctcaagagattacaggagatctttaaggagctgggttgtgaggcaaaattgagaatggaaggggatagcagtccttatgtgactgacaactcgaattacatcgtggatttatacttcccgacctcgattaaggatgctgaagctgcagggagagaaatttcggccttggaaggcgtagtagaacatgggttgttcttgggtatggctagcgaagtcatcattgctgggaaaactggagttagtgtgaaaaccaagtga

SEQ ID NO: 3033 - protein, 289 aa, Spinacia oleracea
MASAAFSLLPSTSSTTFNRHATTKLLNLKFLHNHRNKPFFTTTIKSLSSPSPTPVLTQDDLKKLAAEKAVDSVKSGMVLGLGTGSTAAFAVSRIGELLSAGKLTNIVGIPTSKRTAEQAASLGIPLSVLDDHPRIDLAIDGADEVDPDLNLVKGRGGALLREKMVEAASDKFIVVVDDTKLVDGLGGSRLAMPVEVVQFCWKYNLKRLQEIFKELGCEAKLRMEGDSSPYVTDNSNYIVDLYFPTSIKDAEAAGREISALEGVVEHGLFLGMASEVIIAGKTGVSVKTK

SEQ ID NO: 3034 - DNA, 804 bp, Arabidopsis thaliana
  CDS (1)..(804)
atgggttctgcattcgatccccttgtcacggccactgaggatctcgccgccgtcaactcggcgccgccactctcaaacctcacgcaagaagaactcaagaaaatcgccgcttataaagccgtcgaattcgtcgaatctggaatggttatcggtctcggcactggctccaccgcgaaacacgccgtggctcgtatcagcgagcttctccgagaaggaaaactcaaggatataatcggaatccctacttcaaccacaacgcatgagcaagcggtgtctctagggataccattatccgatctagattcgcatccggtggtggatctatcaatcgatggcgccgacgaagtcgatccggctcttaatctggtgaaaggacgcggcggatcgttattgagagagaagatgattgaaggagcatctaagaagttcgttgtgattgttgatgaatcgaagcttgtcaagtatatcggaggaagcggactcgctgttccggtggaggttgttccgttctgctgcgatttcacaagggggaaactggaagagctatttagagattcgggatgtgttgcgaagctgaggatgaaaatcggatctaacggcgaagaggcggcgccggctgtgacggataataggaattatgtggtggatttgtatttggagagagatattggagatttagaggtggcgagtgaggcgatattgaggtttcctggagtagtgaagcatgggatgtttctgggaatggcgactacgttgatcgtcgccggcaaatttggtgttaccgtcaaggataggtttggataa

SEQ ID NO: 3035 - protein, 267 aa, Arabidopsis thaliana
MGSAFDPLVTATEDLAAVNSAPPLSNLTQEELKKIAAYKAVEFVESGMVIGLGTGSTAKHAVARISELLREGKLKDIIGIPTSTTTHEQAVSLGIPLSDLDSHPVVDLSIDGADEVDPALNLVKGRGGSLLREKMIEGASKKFVVIVDESKLVKYIGGSGLAVPVEVVPFCCDFTRGKLEELFRDSGCVAKLRMKIGSNGEEAAPAVTDNRNYVVDLYLERDIGDLEVASEAILRFPGVVKHGMFLGMATTLIVAGKFGVTVKDRFG

SEQ ID NO: 3036 - DNA, 675 bp, Oceanobacillus iheyensis
  CDS (1)..(675): transl_table=11
gtgaatgagcaagataaattaaaaaaagcagttggggaaaaagcggcaactatggtgaaggacggaatgaaagttggattaggatcaggatccactgtatattggatgattcgttcattgggtgaacgtattcaacaagatggcttgaaaattgaaggcattccatcttcaaatcaaacagcaacatgggcagaagaagctggtattccgttaacagatttctcgaatgtgaaagaattagatataacgattgatggggcggatgaagtagatgctaataatcatttgattaagggtgggggagctgcgctttttcgtgaaaaaataattgctcaagctgctaaagagtttgtcataattgtcgatcaatcaaaagtagtagagactctaggagaattttctcttcctgttgaggttctgccattttcatggcaacgaactgcaaatgaaatatctaaattaggttgtgttcctacggttcgtgttcatgaggaggagccactagttaccgataatgggaattatattttagattgtccttttaaagttattccgcatccggataaattaaataaagagattaaatcaattgtaggagtaattgaaacgggcttatttattgatatggctactacggtaattgttggagaaaaagataatatttatataaaataa

SEQ ID NO: 3037 - protein, 224 aa, Oceanobacillus iheyensis
MNEQDKLKKAVGEKAATMVKDGMKVGLGSGSTVYWMIRSLGERIQQDGLKIEGIPSSNQTATWAEEAGIPLTDFSNVKELDITIDGADEVDANNHLIKGGGAALFREKIIAQAAKEFVIIVDQSKVVETLGEFSLPVEVLPFSWQRTANEISKLGCVPTVRVHEEEPLVTDNGNYILDCPFKVIPHPDKLNKEIKSIVGVIETGLFIDMATTVIVGEKDNIYIK

SEQ ID NO: 3038 - DNA, 657 bp, Yersinia pestis
  CDS (1)..(657): transl_table=11
atgactcaggatgaacttaaaaaagcggtgggctgggcagcattagattacgttaaacccggtacgattgtgggtgtcggcacgggttcaactgcggcgcattttattgacgcgctaggctcgattaaacatcagatcgaaggggctgtttccagttctgatgcttcaaccgccaagctgaaaagctatggtatcccagtatttgattgtaatgacgttgatgtattggatatctatgttgatggtgctgacgaaattaacggccaaatgcagatgattaaaggcggtggcgcagcactgacccgagagaagattattgcggctatcgcccggaagtttatctgtattgctgatgaatccaaacaagttggtgtgctgggtaaattccccctgccagtcgaagtgatcccgatggcccgctcttatgtggcgcgtgagctgattaaattgggtggtttgcctgaataccgtcagaatgtcctgaccgataacggtaacgttattctggatgtccacaacttgagtattttggatgctatcgctttagagaaccaaattaatggcattgccggtgtcgtaacggtggggctatttgcgaatcgcggtgctgatgtggccctgattggtacggccaatggcgttaaagtgattggctaa

SEQ ID NO: 3039 - protein, 218 aa, Yersinia pestis
MTQDELKKAVGWAALDYVKPGTIVGVGTGSTAAHFIDALGSIKHQIEGAVSSSDASTAKLKSYGIPVFDCNDVDVLDIYVDGADEINGQMQMIKGGGAALTREKIIAAIARKFICIADESKQVGVLGKFPLPVEVIPMARSYVARELIKLGGLPEYRQNVLTDNGNVILDVHNLSILDAIALENQINGIAGVVTVGLFANRGADVALIGTANGVKVIG

SEQ ID NO: 3040 - DNA, 675 bp, Oceanobacillus iheyensis
  CDS (1)..(675): transl_table=11
gtggaatacagtgataaacaaattgcagcacaagaagcggtaaggtatatcaaagatggtatggttattggaattggttctggatcaaccgtaaatgaatttctctattgtttagcagctagaatgagaaaagagagattacaagtagtagggatacctgcgtcgaaaaaatcagagcgattagcaacggagcttggaatccctttaactacttttgctacttatcaaaacgttgatattgcaattgacggaacagatgagatcgatgaccagctgtatttagttaaaggtgggggcggctcactagtaagagaaaaaatgatcgatttggttgctgaaacctttatcgtaattgctagtggtaaaaagaaaataaagaagctaggatcgttcccagtaccagttgaagtagtaccatttggatggcaggctaccgaacaaaggctgcaacaatttggatgtcagaccaatttgcggatggtggaagaagacatttttgtctcggacaatcagaactatattattgattgtgattttaaagaaatcgatgatgcagaagcattacatcgatcattaaaacaaattgtaggtgtaatcgaaactgggatttttataaatatggtagataaagcaattgttgcagataacggtgagttatccatattggaaaaataa

SEQ ID NO: 3041 - protein, 224 aa, Oceanobacillus iheyensis
MEYSDKQIAAQEAVRYIKDGMVIGIGSGSTVNEFLYCLAARMRKERLQVVGIPASKKSERLATELGIPLTTFATYQNVDIAIDGTDEIDDQLYLVKGGGGSLVREKMIDLVAETFIVIASGKKKIKKLGSFPVPVEVVPFGWQATEQRLQQFGCQTNLRMVEEDIFVSDNQNYIIDCDFKEIDDAEALHRSLKQIVGVIETGIFINMVDKAIVADNGELSILEK

SEQ ID NO: 3042 - DNA, 711 bp, Yersinia pestis
  CDS (1)..(711): transl_table=11
atgagcaatcaacaaaatgacgccaagagggctgccgcccgtcgggtgattcaggatttcgtgttcgatggcatgacgttggggctgggttccgggaccacctcgcatttctttgtgcgcgaactgggccagcatgttgccaagggcttgcagttaacctgcaccacaacttctcgtgcgacgagcgaggtggcgcgtgacgtgggcattgagctctcggatccgaatgagatgaatgagattgatctgaccatcgacggcccagatgagattgaccggcggttcaatatgatcaagggcggtggagcctgccttctgtgggagaaaattatcgcccatgcctcgaagcggatgatttgtatttgtgatgagacaaaaatcgtcaattgcttggggcaatttccgctgccagtcgaaatcgtcccctttgcctggaaacagaccgaacgcagggtcgagcgggtactcgcggaacagggtctccatcatgtgccgattattcggcgtatggggggcgggcacccggtgatcactgacagtggaaactttattctggattgccattgcggggcgattatcacggcccctgaaccgctggaaatagagcttaatcgcattccgggggtggttgaaaacggtcttttcacccgtgaggctaccggtatggtggtgggctattttgacggttcctcctacgttcaactgcgataa

SEQ ID NO: 3043 - protein, 236 aa, Yersinia pestis
MSNQQNDAKRAAARRVIQDFVFDGMTLGLGSGTTSHFFVRELGQHVAKGLQLTCTTTSRATSEVARDVGIELSDPNEMNEIDLTIDGPDEIDRRFNMIKGGGACLLWEKIIAHASKRMICICDETKIVNCLGQFPLPVEIVPFAWKQTERRVERVLAEQGLHHVPIIRRMGGGHPVITDSGNFILDCHCGAIITAPEPLEIELNRIPGVVENGLFTREATGMVVGYFDGSSYVQLR

SEQ ID NO: 3044 - DNA, 672 bp, Acinetobacter sp
  CDS (1)..(672): transl_table=11
atgagtctatatgctacccaagatgagaaaaaacaagcagcggcaaaagctgctttaaaacacttaccaaaaggggggattttgggggtaggaacaggaagtaccgtcaattttctgattgaacttttacctgaattacagcttgaagcggcggttgctagctcggaagcaacagctaaacgcctaaaagaattgggtatcgaagtggttgatatgaaccatgtgggtggattggatgcttatgtcgatggtgcagatgaaattgaccgtcatatgcatatgattaaaggggggggggcggcactcacacgtgaaaaaattgtggcatcgattgcaaagaaatttgtgtgtattgttgatgattcaaaatgggtagagcagttaggtcgcgattttccattgccagttgaagtgattccaatggcgcgttctgctgttgcacgcaaacttgtgagtttaggtggagatcccgtatatcgcgaaggcgtggttacagacaacggaaacgtaattttagacgtttataacctgaatattttaaacgcacttgagcttgaaaaaaccattaatgatattcctggtgtagtgaccaatggtatttttgcattaaacgcagcatccattgccattgttgcgaccaataatggtattgaagagcgtacagcagtttaa

SEQ ID NO: 3045 - protein, 223 aa, Acinetobacter sp
MSLYATQDEKKQAAAKAALKHLPKGGILGVGTGSTVNFLIELLPELQLEAAVASSEATAKRLKELGIEVVDMNHVGGLDAYVDGADEIDRHMHMIKGGGAALTREKIVASIAKKFVCIVDDSKWVEQLGRDFPLPVEVIPMARSAVARKLVSLGGDPVYREGVVTDNGNVILDVYNLNILNALELEKTINDIPGVVTNGIFALNAASIAIVATNNGIEERTAV

SEQ ID NO: 3046 - DNA, 714 bp, Aeropyrum pernix
  CDS (1)..(714): transl_table=11
gtgggtggttgtgatcctatggatgaggccgcccggggagcgctcgaccttctaggcaggattggcggggagctcggcgttctcggcgtgggtactggtaggactgtgatgaggtttctccgcgaggccagcgcccgtggggtggagccgggggtggctgtgcccagtagtttcgagactgctgttgagctggctggtttggggtggagtgtgggtgacccccgtgtataccggggggttaacgtttatgttgacggggcggacgaggcagagcccgggagagggtatatggtgaaggggggcgggggggctctgcttggcgagaagatactttcctccaggtcgaagctaaacatattcatagtcggcgaggacaggctcgtggggaggctgggggagaagacgcccgttcctgtggaggtagagcccgggttcgtctcgatggttctcgcaagcctggaggagctgggccttaacccgcgggtgaggacctcgccgggtaaaagggggcctgtggtcagcgactggggcggggttatagtggacctactcacaggccccctggaggaccctcgggggttggagtctatgctcaggaatgtgcctggcgtgagggagacgggcctgttcctcgggctggctgactatattgtcgtggggctgtccagctgcggctacagggttctaggcccctacagggggagggcggtctag

SEQ ID NO: 3047 - protein, 237 aa, Aeropyrum pernix
MGGCDPMDEAARGALDLLGRIGGELGVLGVGTGRTVMRFLREASARGVEPGVAVPSSFETAVELAGLGWSVGDPRVYRGVNVYVDGADEAEPGRGYMVKGGGGALLGEKILSSRSKLNIFIVGEDRLVGRLGEKTPVPVEVEPGFVSMVLASLEELGLNPRVRTSPGKRGPVVSDWGGVIVDLLTGPLEDPRGLESMLRNVPGVRETGLFLGLADYIVVGLSSCGYRVLGPYRGRAV

SEQ ID NO: 3048 - DNA, 696 bp, Agrobacterium tumefaciens
  CDS (1)..(696): transl_table=11
atggatgcccgccagatgaagatcaaggccgccgaggccgcattgtcccatgtgcaggacggcatgcggctgggtatcggcaccggttcgacggccgaggaattcgtccgtcttctggcggagaaggttgcggccggcctgaaggtcgagggcgttcccacatccgagcgtaccgcacgtctgtgcgtcgagcttggcgtgccgctgaaatccctcgatgaattgccggaactggatctgaccatcgacggcgccgacgaagttgatcatgtactacgtctcgtcaagggcggcggcggcgcgctgctgcgcgaaaagatcgtggcggcagcatccggccgcatgatcgtcatcgccgaccagagcaaggtcgtcgagacgctgggcgcctttccgcttcccatcgagatcaatcccttcggccaggtggcgacacgcatcgccattgaaaaactggcggctcggtcgggtctttcgggcgaactgacgatgcgttcttccggcgacggcgccttcatgacggatggcggacacctgatcctcgacgcatcttttggccgtattcctgatgcagaagcactggcacgcgagctgaacactatccccggtgttgttgagcacggacttttcataaatttggcatcgcttgccatcatcgcgggccctgaaggcgcccgcatgatgcaggcagtataa

SEQ ID NO: 3049 - protein, 231 aa, Agrobacterium tumefaciens
MDARQMKIKAAEAALSHVQDGMRLGIGTGSTAEEFVRLLAEKVAAGLKVEGVPTSERTARLCVELGVPLKSLDELPELDLTIDGADEVDHVLRLVKGGGGALLREKIVAAASGRMIVIADQSKVVETLGAFPLPIEINPFGQVATRIAIEKLAARSGLSGELTMRSSGDGAFMTDGGHLILDASFGRIPDAEALARELNTIPGVVEHGLFINLASLAIIAGPEGARMMQAV

SEQ ID NO: 3050 - DNA, 666 bp, Alkalilimnicola ehrlichei
  CDS (1)..(666): transl_table=11
atgatgagcgctgaccagggcaagcgcatggcggccgaggcggccatggagtacgtggaagagaacaccgtgatcggggtgggcaccggctccaccgtcaatttctttatcgacgccctggccgacatgaaggcccgcatcgacggcaccgtgtccagctccgaggcgagcaccgcccggctacgccagtacggcatcccggtgctggacctcaacgaggtgggcaccatgcccatttacgtggacggcgccgatgaatccaaccgcttcctgcagctgatcaagggcggcggtggcgcgctcacccgcgagaagatcgtggccgcggccgccgaacgcttcgtctgcgtggcggacgagtccaagctggtggacgtgctgggcgagttcccgctgccggtggaggtcatccccatggcccgcagctacgtcgcccgtgagctggtcaaactgggcggccggccgcaactgcgctccggtttcaccaccgacaacggcaacgtcatcctggacgtgcgcggcctcaagatcatggagccgatcaagctcgagcagcagatcaacaacatccccggcgtggtcaccaacgggctgttcgccctgcgccccgccgacgtcctgctgctcggcaccgccgagggcgtgcgcaaactcaccgcggagtaa

SEQ ID NO: 3051 - protein, 221 aa, Alkalilimnicola ehrlichei
MMSADQGKRMAAEAAMEYVEENTVIGVGTGSTVNFFIDALADMKARIDGTVSSSEASTARLRQYGIPVLDLNEVGTMPIYVDGADESNRFLQLIKGGGGALTREKIVAAAAERFVCVADESKLVDVLGEFPLPVEVIPMARSYVARELVKLGGRPQLRSGFTTDNGNVILDVRGLKIMEPIKLEQQINNIPGVVTNGLFALRPADVLLLGTAEGVRKLTAE

SEQ ID NO: 3052 - DNA, 711 bp, Anabaena sp
  CDS (1)..(711): transl_table=11
atgaccgttacagcagaccccgtgactttgatgaagcaagaagtaggcaaagccgccgccgccttggtaaagtccggctcaattgtaggcttaggtacagggtcaactacagcttacacaattcaatatttaggcgatcgcctcaagtctggtgaactaaccgatattgttggtattccgacctcatttcagtcagaagttttgtccaagcaatatggtgttcctctcacaaccttagacgctgtagatcatattgatatcgctattgatggggctgatgaagttgacccccacaaaaacttgattaaaggtggtggtgcagcccatacccgtgaaaaagtggttgattacttagccaatcaattcatcgtcgtagtagatagtggtaaattagtagaccgcttaggttcggtttttgctgtaccagtagaagtcatcccaatggcaatcacccccgtcaccaatgccattaagcaactaggtggcaaaccagaactgcgtatgggtgtaaaaaaagccgggccagtgatcaccgaccaaggtaactttgtcttagatgtccgatttgactctattgacgacccagttaacctcgaaaaaatattgaataatattcctggggttctagagaatggtatcttcgtcaactgtgcagacatagttttagttggtgaagtcaaagacggtcagccactagtcagacgactatag

SEQ ID NO: 3053 - protein, 236 aa, Anabaena sp
MTVTADPVTLMKQEVGKAAAALVKSGSIVGLGTGSTTAYTIQYLGDRLKSGELTDIVGIPTSFQSEVLSKQYGVPLTTLDAVDHIDIAIDGADEVDPHKNLIKGGGAAHTREKVVDYLANQFIVVVDSGKLVDRLGSVFAVPVEVIPMAITPVTNAIKQLGGKPELRMGVKKAGPVITDQGNFVLDVRFDSIDDPVNLEKILNNIPGVLENGIFVNCADIVLVGEVKDGQPLVRRL

SEQ ID NO: 3054 - DNA, 711 bp, Anabaena variabilis
  CDS (1)..(711): transl_table=11
atgaccgttacagcagaccccgtgactttgatgaagcaagaagtgggcaaagccgccgccgccttggtaaagtccggctcgattgtaggcttaggtacagggtcaactacagcttacacaattcaatatttaggcgatcgcctcaagtcgggtgaactaaccgatattgttgggattccgacctcatttcagtcagaagttttatccaagcaatacggcgttcctctcacaaccttagacgctgtagatcatattgatatcgctattgatggggctgatgaagttgacccccagaaaaacctgattaaaggtggtggtgcagcccatacccgcgaaaaagtagttgattacttagctaatcaattcatcgttgtagtagacagtggtaaattagtagaccgcttgggttcggtttttgccgtaccagtagaagtcatcccaatggcaatcacccccgttaccaatgccattaagcagctaggtggcaaaccagaattgcggatgggtgtaaaaaaagcagggccagtcatcactgaccagggcaactttgtcttagatgtcagatttgattccattgacgacccagttaacctcgaaaaaatattgaataatattcctggggttctggagaatggtatctttgtcaactgtgcagacatagttttagttggtgaagtcaaagacggccagccactagtcagacaactataa

SEQ ID NO: 3055 - protein, 236 aa, Anabaena variabilis
MTVTADPVTLMKQEVGKAAAALVKSGSIVGLGTGSTTAYTIQYLGDRLKSGELTDIVGIPTSFQSEVLSKQYGVPLTTLDAVDHIDIAIDGADEVDPQKNLIKGGGAAHTREKVVDYLANQFIVVVDSGKLVDRLGSVFAVPVEVIPMAITPVTNAIKQLGGKPELRMGVKKAGPVITDQGNFVLDVRFDSIDDPVNLEKILNNIPGVLENGIFVNCADIVLVGEVKDGQPLVRQL

SEQ ID NO: 3056 - DNA, 798 bp, Arabidopsis thaliana
  CDS (1)..(798)
atggcgcttgcgtatgatcctctcttcattacatcggacaaatctttgtccgcctttgatgttgcctcttcaccgcctcagcccatgaatttaacacaagacgagctcaaacgtatcgccgcttacaaagccgtggaattcgtcgagtccggcatggttctcggtctcggaaccggctccaccgccaaacacgccgtcgaccgaatcggcgagcttctccgtcaaggcaaactcgagaacatcgttggtataccaacgtctaagaagacgcaggagcaggctctgtctctcggcatccctctctctgatctcgacgcacaccctgtcatcgatctctccatcgacggcgcagacgaggtcgacccttttctcaacctggtaaaaggcagaggagggtctctgcttcgagagaagatgatcgaaggagcttctaagaagtttgtggtgattgttgacgactccaagatggtgaagcatattggtggaagcaagcttgctcttccggtggagatagtgcccttttgctggaagttcacggcggagaagctccggagtctgctggaaggatacgggtgtgaagcgaatcttcggttgggagagaaagggaaggcctttgtgacagacaatgggaattacatagtggatatgcatgtggaagaggatatgggagatttgggagcagtgagtgatgcgattctgaggctaccgggagtagtggaacatgggatgtttctggatatggcttctactgttatcattgcaggtgagcttggtgttaagatcaagaacaaacactga

SEQ ID NO: 3057 - protein, 265 aa, Arabidopsis thaliana
MALAYDPLFITSDKSLSAFDVASSPPQPMNLTQDELKRIAAYKAVEFVESGMVLGLGTGSTAKHAVDRIGELLRQGKLENIVGIPTSKKTQEQALSLGIPLSDLDAHPVIDLSIDGADEVDPFLNLVKGRGGSLLREKMIEGASKKFVVIVDDSKMVKHIGGSKLALPVEIVPFCWKFTAEKLRSLLEGYGCEANLRLGEKGKAFVTDNGNYIVDMHVEEDMGDLGAVSDAILRLPGVVEHGMFLDMASTVIIAGELGVKIKNKH

SEQ ID NO: 3058 - DNA, 678 bp, Archaeoglobus fulgidus
  CDS (1)..(678): transl_table=11
atggactcgagtgggaagtataacgccgcaaagcttgctcttgagcttgtaaaggatggcatggttctcggaatagggagtggttctacagttgaggtgtttctgaacctgctcggagacaaaataagggaggagggactggaaatctacggaattccatcatcataccagtcctacttcgctgcgatcaggaatggggttgaaattgttgacctggttgagttcgagccggacctgtgcattgacggggctgatcaggtagatgccaagctgaactgcataaagggcggcgggggagcgatgacgagggaaaaaatcgttgccaaggcgagcaggaaggttgtgataatcgtggacgagagcaagcttgtggaaaaactgtcaatgcctgtgccggttgaagtgctgcccttcgcttacggatgggttctgagggagattgagaaaatgggatgcaaggcaaggctgagggaaggaaagggaaagattgggccggtgataacggataacggaaattttgttgtggactgcgactttggtgttatagaagaggatagggttgagggtttggagggtgagataaagctgattagcggggttgtcgagaacggtatcttttcgaaagagctgatagatgctgtaattgctgggtcaagtcgatctgcaagatttctttaa

SEQ ID NO: 3059 - protein, 225 aa, Archaeoglobus fulgidus
MDSSGKYNAAKLALELVKDGMVLGIGSGSTVEVFLNLLGDKIREEGLEIYGIPSSYQSYFAAIRNGVEIVDLVEFEPDLCIDGADQVDAKLNCIKGGGGAMTREKIVAKASRKVVIIVDESKLVEKLSMPVPVEVLPFAYGWVLREIEKMGCKARLREGKGKIGPVITDNGNFVVDCDFGVIEEDRVEGLEGEIKLISGVVENGIFSKELIDAVIAGSSRSARFL

SEQ ID NO: 3060 - DNA, 768 bp, Ashbya gossypii
  CDS (1)..(768)
atgtcggtaacgccaattgaagagctgccctccctgggcgacgcgctggaggacgcaaagcgcgcagcgtcgtaccgcgccgtggacgagaatctagaccccgcgaaacaccgcgtggtcgggataggcagcggatcgacagtggtctacgtggcggaacgcataggaaaataccaggcgtcacctgagctgaaggcgaaggtggagtttatctgcattcccacggggttccaatcccgccagttgatcctcgacaacggcctgcgtctgggcagcatcgagcagtacccagaggtggacattgcgttcgacggtgcggacgaggtggaccccgagctgaacctgatcaagggcggcggtgcctgtctgttccaggaaaagctcgtgagcacgagcagcgctcaattcatcgtggtcgcggactcccgtaagcgctcgccgcaacgactgggcacaagctggacgcgtggcgtgcccgtcgaggtggtgcccagcgcgtacgtgcgcgtactgcgcgacctgcacggcattcccggctgccgcagcgcgcagctgcggctcggggaaccgggcaaggcgggcccggtcgtcaccgacaacaacaacctgctcatcgacgccgatttcggcccgctcgaagaccccgccgcgctgcacgcccggatcaaggccctcgtcggcgtcgtcgagaccggcatcttcgccggtaacgctgccaaggcgtacttcggcagcgccgacggctctactcagaccctcgcacgctag

SEQ ID NO: 3061 - protein, 255 aa, Ashbya gossypii
MSVTPIEELPSLGDALEDAKRAASYRAVDENLDPAKHRVVGIGSGSTVVYVAERIGKYQASPELKAKVEFICIPTGFQSRQLILDNGLRLGSIEQYPEVDIAFDGADEVDPELNLIKGGGACLFQEKLVSTSSAQFIVVADSRKRSPQRLGTSWTRGVPVEVVPSAYVRVLRDLHGIPGCRSAQLRLGEPGKAGPVVTDNNNLLIDADFGPLEDPAALHARIKALVGVVETGIFAGNAAKAYFGSADGSTQTLAR

SEQ ID NO: 3062 - DNA, 669 bp, Azoarcus sp
  CDS (1)..(669): transl_table=11
atgacccaggacgaactcaagaaagccgccgccctcgccgcactcgactatgtggaggacggaatgatcgtcggcgtcggcaccggctcgacggtgaaccacttcatcgacgggctggccggcatcaagcaccgtatccgcggcgccgtctccagttccgaggccagctccaaacgccttgccgcgcatggcattgcgctgctcgacctcaacgacgtggacgaactgccggtgtatatcgacggcgcggacgaaatcgaccacggcttcgcgatgatcaagggcggcggcggcgcgctcacgcgcgagaagatcgtcgctgcggtcgcacgccgctttgtctgcatctgcgacgaatccaagcgggtggacgtactgggccgctttccgctgccgatcgaggtcatcccgatggcgcgcagccaggtgatgcgtgcggcggcagcgctgggcgcgacgccgcggctgcgcgagggcttcgtgaccgacaacggcaacctgatcatcgacctccatggcctgtcgatcaccgacccgtgcgcaaccgagcaggccctgaacgcggtcgtgggcgtggtcaccaacggcctgttcgcggcgcgcggtgccgacaccctgctgctggccagcgcccaaggcgtgcgccggttcgagcgttccgcaacataa

SEQ ID NO: 3063 - protein, 222 aa, Azoarcus sp
MTQDELKKAAALAALDYVEDGMIVGVGTGSTVNHFIDGLAGIKHRIRGAVSSSEASSKRLAAHGIALLDLNDVDELPVYIDGADEIDHGFAMIKGGGGALTREKIVAAVARRFVCICDESKRVDVLGRFPLPIEVIPMARSQVMRAAAALGATPRLREGFVTDNGNLIIDLHGLSITDPCATEQALNAVVGVVTNGLFAARGADTLLLASAQGVRRFERSAT

SEQ ID NO: 3064 - DNA, 663 bp, Azoarcus sp
  CDS (1)..(663): transl_table=11
atgacccaggacgaactcaagaaggcagccgcgatcgcggcactcgactacgtcgaaaacggaatgatcgtcggcgtcggcaccggctcgaccgtcaatcatttcatcgacggtctggccggcatcaagggccggatcgcgggagcggtgtccagttcggaagccagcgcacgccgcctgcaggcccacggcatcccggttctggatctgaacgacatcaccgacctgccggtgtacgtggatggagccgacgagatcgatggcgggttttgcatgatcaagggcggaggcggcgcgctgacccgcgaaaagatcgtcgcggcggttgcgcgccggttcatctgcatctgcgacgcgagcaagaaggtcgcctgtctcggccgctttccgctgccggtcgagatcattccgatggcccgcgcctacgtcgaacgcgaactggtccggatcggcggtcggcccgaactgcgcgagggattcgtcaccgacaacggcaacctgatcgtggacgtgcacggcttgatgattacctcaccgcgcgcgctcgagaccgagctgaaccagattgtcggggtggtcaccaatggcctgttcgcgcgccgcggcgcggacgtgctgctgctggcaacgctcgccggggtcgagcgacaggttgcaaactga

SEQ ID NO: 3065 - protein, 220 aa, Azoarcus sp
MTQDELKKAAAIAALDYVENGMIVGVGTGSTVNHFIDGLAGIKGRIAGAVSSSEASARRLQAHGIPVLDLNDITDLPVYVDGADEIDGGFCMIKGGGGALTREKIVAAVARRFICICDASKKVACLGRFPLPVEIIPMARAYVERELVRIGGRPELREGFVTDNGNLIVDVHGLMITSPRALETELNQIVGVVTNGLFARRGADVLLLATLAGVERQVAN

SEQ ID NO: 3066 - DNA, 663 bp, Bacillus anthracis
  CDS (1)..(663): transl_table=11
atggatttaaaacagatagctggtgaatatgctgcaaccttcgtaaaagatggtatgaagattggtcttggtacaggatcaaccgcatactggacgatacaaaaattaggtcaacgtgtaaaagagggattatcaattcaagctgtcccgacatcaaaggaaacggaagcattggcacagcagctaaatattccgttgatttcgttaaacgacgtacaaagtcttgatcttacaattgatggagctgatgaaattgattctaatttacagcttattaaaggaggtggtggtgcattacttcgcgagaaaattgtagcctcctcctcgaaagaacttatcattatcgttgatgaatcaaaagttgtgacgcgtttagggacttttccattacctattgaaatcataccttttgcatggaaacaaaccgaaagtaaaattcaatctttaggatgtcaaacaacgttacgcttaaaaaataatgaaacgtttatcaccgataataataacatgattatcgattgtatattccctaatcatatacctactccttccgatttacacaaaagattaaaaatgattactggtgtagttgaaaccggattgtttgttaatatgactagtaaggcgattattggaacaaaaaacgggatacaggaattataa

SEQ ID NO: 3067 - protein, 220 aa, Bacillus anthracis
MDLKQIAGEYAATFVKDGMKIGLGTGSTAYWTIQKLGQRVKEGLSIQAVPTSKETEALAQQLNIPLISLNDVQSLDLTIDGADEIDSNLQLIKGGGGALLREKIVASSSKELIIIVDESKVVTRLGTFPLPIEIIPFAWKQTESKIQSLGCQTTLRLKNNETFITDNNNMIIDCIFPNHIPTPSDLHKRLKMITGVVETGLFVNMTSKAIIGTKNGIQEL

SEQ ID NO: 3068 - DNA, 663 bp, Bacillus cereus
  CDS (1)..(663): transl_table=11
atgaatttaaaacaactcgccggtgaatatgctgcaactttcgtaaaagatggaatgaagattgggcttggtacaggttctaccgtatactggacgatagaaaaattaggtgaacgtgtaaaagaaggactatcatttcaagctgtcccgacatcaaaagaaactgaagtattagctcagcaactaaatatcccactaatttcattaaacgacatacaaagtcttgatcttacaattgatggagcggatgaaattgattcaaatttacaccttataaaaggaggcggtggcgcattacttcgtgaaaaaatcgttgcctcctcctctaaagaactacttatcattgctgatgaatcaaaacttgtaacgcatttaggtacttttccattacctgttgaaatcatacctttttcatggaaacaaaccgaaagtaaaattcaatctttaggttgtcaaacaacgttacgcttaaaaaataatgaaacatttataaccgataataataacatgattattgattgtgtattccctcataacataacgaatcctgccaatttacacaatcatttaaaaatgattactggtgtagttgaaaccggattgtttgttaatatgactagtaaggcgattattggaacaaaaaacgggatacaggaattataa

SEQ ID NO: 3069 - protein, 220 aa, Bacillus cereus
MNLKQLAGEYAATFVKDGMKIGLGTGSTVYWTIEKLGERVKEGLSFQAVPTSKETEVLAQQLNIPLISLNDIQSLDLTIDGADEIDSNLHLIKGGGGALLREKIVASSSKELLIIADESKLVTHLGTFPLPVEIIPFSWKQTESKIQSLGCQTTLRLKNNETFITDNNNMIIDCVFPHNITNPANLHNHLKMITGVVETGLFVNMTSKAIIGTKNGIQEL

SEQ ID NO: 3070 - DNA, 663 bp, Bacillus cereus
  CDS (1)..(663): transl_table=11
atgaatttaaaacagctcgctggcgaatatgctgctaactttgtaaacgatggcatgaaaattgggcttggtacaggttctactgtatattggacaatacaaaaattaggtgagcgtgtaaaagaaggattatcatttcaagctgtaccaacatcaaaggaaactgaagcattagcacagcaactaaatatccccctaatttcgttaaacgacgtacaaagtcttgatcttacaattgatggagcggatgaaattgattcaaatttacaacttataaaaggcggtggcggtgcattacttcgtgaaaaaatcgttgcctcttcctctaaaaaactaattatcattgctgatgaatcgaaacttgtaacacatttaggtacttttccattacctattgaaatcatccctttttcatggaaacaaaccgaaaataaaattcagtctttaggatgtcaaacaacattacgtttgaaaaacaatgaaacctatataaccgataacaataacatgattatcgattgtatattccctaatcatatttctaatcctgtccatttacacacccaattaaaaatgattactggtgtagttgaaacagggttgtttataagtatgacgagtacagcaattattggtactaaaaatgggataaagaaattgtaa

SEQ ID NO: 3071 - protein, 220 aa, Bacillus cereus
MNLKQLAGEYAANFVNDGMKIGLGTGSTVYWTIQKLGERVKEGLSFQAVPTSKETEALAQQLNIPLISLNDVQSLDLTIDGADEIDSNLQLIKGGGGALLREKIVASSSKKLIIIADESKLVTHLGTFPLPIEIIPFSWKQTENKIQSLGCQTTLRLKNNETYITDNNNMIIDCIFPNHISNPVHLHTQLKMITGVVETGLFISMTSTAIIGTKNGIKKL

SEQ ID NO: 3072 - DNA, 663 bp, Bacillus cereus
  CDS (1)..(663): transl_table=11
atggatttaaaacagatagctggtgaatatgctgcaaccttcgtaaaagatggtatgaagattggtcttggcacaggatcaactgcatactggacgatacaaaaattaggtcagcgtgtaaaagagggattatcaattcaagctgtcccgacatcaaaggaaacggaagcattggcacagcagctaaatattccgttgatttcgttaaacgacgtacaaagtcttgatcttacaattgatggagctgatgaaattgattctaatttacagcttattaaaggaggcggtggtgcattacttcgcgagaaaattgtagcctcctcctcgaaagaacttatcattatcattgatgaatcaaaagttgtgacacgtttagggacttttccattacctattgaaatcataccttttgcatggaaacaaaccgaaagtaaaattcaatctttaggatgtcaaacaacgttacgcttaaaaaataatgaaacgtttatcaccgataataataacatgattatcgattgtatattccctaatcatatacctactccttccgatttacacaaacgattaaaaatgattactggtgtagttgaaaccggattgtttgttaatatgactagtaaggcgattattggaacaaaaaacgggatacaggaattatga

SEQ ID NO: 3073 - protein, 220 aa, Bacillus cereus
MDLKQIAGEYAATFVKDGMKIGLGTGSTAYWTIQKLGQRVKEGLSIQAVPTSKETEALAQQLNIPLISLNDVQSLDLTIDGADEIDSNLQLIKGGGGALLREKIVASSSKELIIIIDESKVVTRLGTFPLPIEIIPFAWKQTESKIQSLGCQTTLRLKNNETFITDNNNMIIDCIFPNHIPTPSDLHKRLKMITGVVETGLFVNMTSKAIIGTKNGIQEL

SEQ ID NO: 3074 - DNA, 663 bp, Bacillus thuringiensis subsp
  CDS (1)..(663): transl_table=11
atggatttaaaacagatagctggtgaatacgctgcaaccttcgtaaaagatggtatgaaggttggtcttggtacaggatcaaccgcatactggacgatacaaaaattaggtcaacgtgtaaaagagggattatcaattcaagctgtcccgacatcaaaggaaacggaagcattggcacagcagctaaatattccgttgatttcgttaaacgacgtacaaagtcttgatcttacaattgatggagctgatgaaattgattctaatttacagcttattaaaggaggcggtggtgcattacttcgcgagaaaattgtagcctcctcctcgaaagaacttatcattatcgttgatgaatcaaaagttgtgacacgtttagggacttttccattacctattgaaatcataccttttgcatggaaacaaaccgaaagtaaaattcaatctttaggatgtcaaacaacgttacgcttaaaaaataatgaaacgtttataaccgataataataacatgattgtcgattgtatattccctaatcatatacctactccttccgatttacacaaacgattaaaaatgattactggtgtagttgaaactggattgtttgttaatatgactagtaaggcgattattggaacaaaaaacgggatacaggaattataa

SEQ ID NO: 3075 - protein, 220 aa, Bacillus thuringiensis subsp
MDLKQIAGEYAATFVKDGMKVGLGTGSTAYWTIQKLGQRVKEGLSIQAVPTSKETEALAQQLNIPLISLNDVQSLDLTIDGADEIDSNLQLIKGGGGALLREKIVASSSKELIIIVDESKVVTRLGTFPLPIEIIPFAWKQTESKIQSLGCQTTLRLKNNETFITDNNNMIVDCIFPNHIPTPSDLHKRLKMITGVVETGLFVNMTSKAIIGTKNGIQEL

SEQ ID NO: 3076 - DNA, 687 bp, Bacillus clausii
  CDS (1)..(687): transl_table=11
ttggatcagctgaaaagaatggcggcggaagctgctgcagagtatgtgaaagatggcatgaagatcgggctaggttctggttcaacggtgtttgaatttgtccgtgtgttaggagaaaaagcaaaagaagggctgaacatacaagctgtggcggcctcacggaaaacggaagcacttgctaaagcatgtggcatacacatcatcgattttccaacaatggaaaagctagaggtcgcttttgacggagctgatgaaattgcccctggccttatgttattaaaagggggcggcgggtcgcttttacgagaaaaactggtagcggcagcagcgaagcgtctcgtcgtacttgccgatgaaagcaagcttgtagaggagttgggcgctttcaaactaccagtcgagatcattccatttgggtgggaaacaacagccatgcggattgaagcgctaggcggtgtagcgagtttgcggcaaacgggcaaaagcccatttgtttcagataaccataattggatacttgactgtgattttggcaacattcgcgatccttatagcttgcatgaaaaggtgaaaaaacttgttggcgtcgtagaaacaggcctatttttggacatggcttgcgaagccattgtagcaagcaaaaacggtatccatcatataacaaaaggagacgaattcaatgtttga

SEQ ID NO: 3077 - protein, 228 aa, Bacillus clausii
MDQLKRMAAEAAAEYVKDGMKIGLGSGSTVFEFVRVLGEKAKEGLNIQAVAASRKTEALAKACGIHIIDFPTMEKLEVAFDGADEIAPGLMLLKGGGGSLLREKLVAAAAKRLVVLADESKLVEELGAFKLPVEIIPFGWETTAMRIEALGGVASLRQTGKSPFVSDNHNWILDCDFGNIRDPYSLHEKVKKLVGVVETGLFLDMACEAIVASKNGIHHITKGDEFNV

SEQ ID NO: 3078 - DNA, 705 bp, Bartonella henselae
  CDS (1)..(705): transl_table=11
atgaatgttcagcaattaaaaaaaatggcggctttaaaagcacttgaatttgttgaagatgatatgcggcttggtatcggatctggttcgacagtaaatgagtttatccctcttcttggtgagcgtgttgcgaatggtctgcgcgtgacttgtgttgcaacctcgcagtattctgaacaactctgtcataaatttggcgtgcctatcagcaccttagaaaaaatacctgaactagaccttgatattgatggggcggatgaaattggtccagagatgactcttattaaaggagggggtggagcattgttgcatgaaaaaattgtagcatcggcttctcgtgcaatgtttgtcatcgcggatgaaacaaaaatggtaaaaacgcttggtgcttttgcattgccgattgaagttaatccgtttggtatacatgctacacgcatcgccattgaaaaagcagctgataatttaggactttcgggggaaattacattacgaatgaatggcgacgatccttttaaaacagatggtggtcatttcatttttgatgcattttggggacgcattttacagccaaaattattatcggaggcacttcttgcaattcctggtgttgttgagcatggtctttttttgggattggcttcacgtgcaattgtagcgatggcggatagtcagataaaagttttagaaccgtttgatttttag

SEQ ID NO: 3079 - protein, 234 aa, Bartonella henselae
MNVQQLKKMAALKALEFVEDDMRLGIGSGSTVNEFIPLLGERVANGLRVTCVATSQYSEQLCHKFGVPISTLEKIPELDLDIDGADEIGPEMTLIKGGGGALLHEKIVASASRAMFVIADETKMVKTLGAFALPIEVNPFGIHATRIAIEKAADNLGLSGEITLRMNGDDPFKTDGGHFIFDAFWGRILQPKLLSEALLAIPGVVEHGLFLGLASRAIVAMADSQIKVLEPFDF

SEQ ID NO: 3080 - DNA, 705 bp, Bartonella quintana
  CDS (1)..(705): transl_table=11
atgaatgttcagcagttaaaaaaaagggcagctgctaaagcacttgagtttgttcaagatgatatgcggcttggtataggaactggttctacagcaaatgaatttattcgccttcttggggagcgtgttgcagatggtttgcgcgtgactggtgttgctacctcacagtattctgagcaactctgtcggaaatttggggtgcctgttactactttggaacaaatgcctgaacttgaccttgatattgatggggcagatgagatcggcccagagatgactctcattaaaggggggggaggagccttatggcgtgaaaaaattgtagcggcggcatctcgggcgatgcttgtcatcgcagatgaaacaaaggtggtaaagacgcttggtgcttttgcattgccaattgaagtcaatccgtttggtatgcctgctacacgcagactcattgaaaaagtagctgatgatttagggctttcaggggaaattatattacgaatgaatggagagaatccttttaaaacagatggtggtcacttcatttttgatgcattttgggggtgcattttacagccaagattattatcggaggcactccttgcaattcctggtgttgtcgagcatggtcttttttggggattggcttcgcgtgcaattgtagcgatggcagatggtcaaataaaagttttagaatcgtctgatttttaa

SEQ ID NO: 3081 - protein, 234 aa, Bartonella quintana
MNVQQLKKRAAAKALEFVQDDMRLGIGTGSTANEFIRLLGERVADGLRVTGVATSQYSEQLCRKFGVPVTTLEQMPELDLDIDGADEIGPEMTLIKGGGGALWREKIVAAASRAMLVIADETKVVKTLGAFALPIEVNPFGMPATRRLIEKVADDLGLSGEIILRMNGENPFKTDGGHFIFDAFWGCILQPRLLSEALLAIPGVVEHGLFWGLASRAIVAMADGQIKVLESSDF

SEQ ID NO: 3082 - DNA, 699 bp, Bifidobacterium longum
  CDS (1)..(699): transl_table=11
atggataaggcacagcaggatgcgctgaagaaggcggccggcatcgaagccgccaagctcgttgaaaacggcatgatcgcaggcctcggcactggttcgaccgtgaagttcctggtggacgagctcggccgccgtcatcaggaggaaggtcttgagttcactggcgtgaccacgtctcgccgcacgcaggcccaggccgagagctacggcatcaagatcgtggacatcgacgacgtggaccacatcgacgtgaccattgacggcgccgacgaagtcgacaagaacttcaacggcatcaagggcggcggcgctgctctgctgtgggagaagatcgtggccaccaactccaaccagatcgtgtggatcgtggacgagtccaaggttgtggacaccatcggcaagttcccgctgccggtcgaggtcattccgttcggtgccggccaagtcatcaagaagttcgaggcccgcggctacaagccggtgcttcgtcttgacgccgacggcaaggaagtgcgcaccgacgagaacaacttcgtggtggacctgcacctggagcgcatcgatcacccgcaggagctggccgaagacctcatcaacacggtcggcgtggtggagcacggcctgttcctcaacatggtcgacaaggtcatcgtcggcgacccgaacggcccgcgcgtgatgaccaacgccaacaagtga

SEQ ID NO: 3083 - protein, 232 aa, Bifidobacterium longum
MDKAQQDALKKAAGIEAAKLVENGMIAGLGTGSTVKFLVDELGRRHQEEGLEFTGVTTSRRTQAQAESYGIKIVDIDDVDHIDVTIDGADEVDKNFNGIKGGGAALLWEKIVATNSNQIVWIVDESKVVDTIGKFPLPVEVIPFGAGQVIKKFEARGYKPVLRLDADGKEVRTDENNFVVDLHLERIDHPQELAEDLINTVGVVEHGLFLNMVDKVIVGDPNGPRVMTNANK

SEQ ID NO: 3084 - DNA, 669 bp, Blochmannia floridanus
  CDS (1)..(669): transl_table=11
atgatatcaaaagataaattaaagaaattagtaggttgggaagctttgaaatatattaaatctaacacaattataggagtaggaactggttctactgttaattattttattgaagctttgagtagtattaaacaacaaatagagggcgtagtatcaagttcgcagcattcatcaaatcagttaaaaaaattaggtattccattatataatttaaataatttaaatgatcttgagatatatattgatagtgcagatgaaattgacttgcatatgcaaatgattaaaggtggaggaggagcgttaacaaaagagaaaattattgcttttgctgctaaaaaatttatttgtattgttgatgatagtaagcaagtaaatatattgggccgtaagggaccgattcctgtagaagttattcctatggctcgttctgtggtatctaaatcattgatttgtttaggagggttacctgaatatcgtaatggagttattacagataatggtaacagtattttagatgtgtacaatatgaatataacggatgcatctttattagaacaaagaattaataatattccaggagtggtaagtgttgggctttttgctcaacgaaaagcagatattgcattaataggtactcaaaaaggaataaaaatattaaatagtaattaa

SEQ ID NO: 3085 - protein, 222 aa, Blochmannia floridanus
MISKDKLKKLVGWEALKYIKSNTIIGVGTGSTVNYFIEALSSIKQQIEGVVSSSQHSSNQLKKLGIPLYNLNNLNDLEIYIDSADEIDLHMQMIKGGGGALTKEKIIAFAAKKFICIVDDSKQVNILGRKGPIPVEVIPMARSVVSKSLICLGGLPEYRNGVITDNGNSILDVYNMNITDASLLEQRINNIPGVVSVGLFAQRKADIALIGTQKGIKILNSN

SEQ ID NO: 3086 - DNA, 681 bp, Bordetella bronchiseptica
  CDS (1)..(681): transl_table=11
atgcttactcagcaagaactcaagcaacaagccgccgaagcggccctcgaattggtcgaacaggtagccgggccggacgtgatcatcggcgtgggcaccggctcgaccgccgatctgttcatcgatggcctggctcgcttcaagggcaggctgcgcggcacggtggccagttccgagcgcagcgcggcgcggctggccggccacggcctggcggtgctggacctcaacgatgtccagagcatgccgatctacgtggacggcgccgacgagatcgatcccaacctgcacatgatcaagggcggcggcggcgcgctgacgcgcgagaagatcgtggcctcggtggcccggcgctacatctgcatcgccgacgagtccaagctggtcgagcggctgggccgctttccgctgccggtggaggtcattcccatggcgcgcaacgccgtggcgcgcggcttgagccggctgggcggccagccggcgctgcgcgaaggcttcgttaccgacaatggcaacatcatcctggacgtggccggcctgtcgatcgccgacgcgccggggctggagaagaccatcaacgacattccgggcgtggtgacctgcggcctgttcgccctggccggcgccgatgtggcgctgctggccacccaggacggcatccgccgcctggagcgccgcggctga

SEQ ID NO: 3087 - protein, 226 aa, Bordetella bronchiseptica
MLTQQELKQQAAEAALELVEQVAGPDVIIGVGTGSTADLFIDGLARFKGRLRGTVASSERSAARLAGHGLAVLDLNDVQSMPIYVDGADEIDPNLHMIKGGGGALTREKIVASVARRYICIADESKLVERLGRFPLPVEVIPMARNAVARGLSRLGGQPALREGFVTDNGNIILDVAGLSIADAPGLEKTINDIPGVVTCGLFALAGADVALLATQDGIRRLERRG

SEQ ID NO: 3088 - DNA, 687 bp, Borrelia burgdorferi
  CDS (1)..(687): transl_table=11
atggaaaatcaaaaaattttggtagcaaaacatgcaattgatcactatatcaaaagcaatatgaaccttggaatcggaacaggtacaactatttattatgcaataaaatatctaagcgaaaagataaaatcgggtagcttaaaaaatttaaaattctacacaacaagtagtgatacaaaatatttactctcaaaagaacaaattccttatgaatcaaatttttcaaaacttaataaaaatctagacattgcaattgatggagctgatgaaattttattagaaaaaaaaagcttaataaagggaatggggggtgctcatctaatggagaaagtaatagcctacaattcagaaacattgctaataatagcagatgaaaccaaaattgttaaaaaattaggaacaaaaatgcctattcccatagaagttgcccaaaatgctgttggatttattatgactagacttgaagaaatgaatttagaggcaaccttgagaatttgtaaagaaaagaaaggccccactataactgataacaataattatatcttagatgtaaaaatgcatgtggaaaatcctgaaggaacagaaaaatacttcaaactatttccaggtatacttgagattggaatattcaaccataaaaacacaagaatagtttattaccaagacaaacaaatcaaggaagcctaa

SEQ ID NO: 3089 - protein, 228 aa, Borrelia burgdorferi
MENQKILVAKHAIDHYIKSNMNLGIGTGTTIYYAIKYLSEKIKSGSLKNLKFYTTSSDTKYLLSKEQIPYESNFSKLNKNLDIAIDGADEILLEKKSLIKGMGGAHLMEKVIAYNSETLLIIADETKIVKKLGTKMPIPIEVAQNAVGFIMTRLEEMNLEATLRICKEKKGPTITDNNNYILDVKMHVENPEGTEKYFKLFPGILEIGIFNHKNTRIVYYQDKQIKEA

SEQ ID NO: 3090 - DNA, 681 bp, Bordetella parapertussis
  CDS (1)..(681): transl_table=11
atgcttactcagcaagaactcaagcaacaagccgccgacgcggccctcgaattggtcgaacaggtagccgggccggacgtgatcatcggcgtgggcaccggctcgaccgccgatctgttcatcgatggcctggctcgcttcaagggcaggctgcgcggcacggtggccagttccgagcgcagcgcggcgcggctggccggccacggcctggcggtgctggacctcaacgatgtccagagcatgccgatctacgtggacggcgccgacgagatcgatcccaacctgcacatgatcaagggcggcggcggcgcgctgacgcgcgagaagatcgtggcctcggtggcccggcgctacatctgcatcgccgacgagtccaagctggtcgagcggctgggccgctttccgctgccggtggaggtcattcccatggcgcgcaacgccgtggcgcgcggcttgagccggctgggcggccagccggcgctgcgcgaaggcttcgttaccgacaatggcaacatcatcctggacgtggccggcctgtcgatcgccgacgcgccggggctggagaagaccatcaacgacattccgggcgtggtgacctgcggcctgttcgccctggccggcgccgatgtggcgctgctggccacccaggacggcatccgccgcctggagcgccgcggctga

SEQ ID NO: 3091 - protein, 226 aa, Bordetella parapertussis
MLTQQELKQQAADAALELVEQVAGPDVIIGVGTGSTADLFIDGLARFKGRLRGTVASSERSAARLAGHGLAVLDLNDVQSMPIYVDGADEIDPNLHMIKGGGGALTREKIVASVARRYICIADESKLVERLGRFPLPVEVIPMARNAVARGLSRLGGQPALREGFVTDNGNIILDVAGLSIADAPGLEKTINDIPGVVTCGLFALAGADVALLATQDGIRRLERRG

SEQ ID NO: 3092 - DNA, 681 bp, Bordetella pertussis
  CDS (1)..(681): transl_table=11
atgcttactcagcaagaactcaagcaacaagccgccgacgcagccctcgaattggtcgaacaggtagccgggccggacgtgatcatcggcgtgggcaccggctcgaccgccgatctgttcatcgatggcctggcttgcttcaagggcaggctgcgcggcacggtggccagttccgagcgcagcgcggcgcggctggccggccacggcctggcggtgctggacctcaacgatgtccagagcatgccgatctacgtggacggcgccgacgagatcgatcccaacctgcacatgatcaagggcggcggcggcgcgctgacgcgcgagaagatcgtggcctcggtggcccggcgctacatctgcatcgccgacgagtccaagctggtcgagcggctgggccgctttccgctgccggtggaggtcattcccatggcgcgcaacgccgtggcgcgcggcttgagccggctgggcggccagccggcgctgcgcgaaggcttcgttaccgacaatggcaacatcatcctggacgtggccggcctgtcgatcgccgacgcgccggggctggagaagaccatcaacgacattccgggcgtggtgacctgcggcctgttcgccctggccggcgccgatgtggcgctgctggccacccaggacggcatccgccgcctggagcgccgcggctga

SEQ ID NO: 3093 - protein, 226 aa, Bordetella pertussis
MLTQQELKQQAADAALELVEQVAGPDVIIGVGTGSTADLFIDGLACFKGRLRGTVASSERSAARLAGHGLAVLDLNDVQSMPIYVDGADEIDPNLHMIKGGGGALTREKIVASVARRYICIADESKLVERLGRFPLPVEVIPMARNAVARGLSRLGGQPALREGFVTDNGNIILDVAGLSIADAPGLEKTINDIPGVVTCGLFALAGADVALLATQDGIRRLERRG

SEQ ID NO: 3094 - DNA, 726 bp, Bradyrhizobium japonicum
  CDS (1)..(726): transl_table=11
gtgaacatggaccagttgaagcggcaggctgcggcgcgcgccctcgaggaggtgcgtgacggcatgcaactcgggctcggcaccggctcgaccgccaagcatttcgtcgagctgctcggcgagcgcgtcgcggccggactcaaggtgatcggcgtgccgacctccgaggcgacgcgcctcgatgcgacgcgctgcggcgtgccgctgaccacgctcgacgagatcgatcatctcgacatcaccgttgacggcgccgacgagatcgatcccgagctcaacctgatcaagggcggtggcggcgcgctgctgcgcgagaagatcgtggcggccgcatcggatcgcatgatcgtgattgccgacgacaccaaatgggtgccgacgctcggccgctttccgctgccgatcgaggtcatcccgttcgggctcggggcgacgcgccgggcgatcgagacggcatttgcgcagtgcggcgtttccgggcaaatggcggtccgcaaggccaagggtggggacaaggatggccacgttttcgtcaccgatggcggccactggatcctcgatgcccagctcggacggatcgtggatccgcccagcctcgccaaggcgttgagcgccatccccggcgtggtcgagcatgggttgttcatcggcttggccagctcggctgttctggcgggtggcgagggaattcgcgtgattgaacggcgaaagccgaaaggagactag

SEQ ID NO: 3095 - protein, 241 aa, Bradyrhizobium japonicum
MNMDQLKRQAAARALEEVRDGMQLGLGTGSTAKHFVELLGERVAAGLKVIGVPTSEATRLDATRCGVPLTTLDEIDHLDITVDGADEIDPELNLIKGGGGALLREKIVAAASDRMIVIADDTKWVPTLGRFPLPIEVIPFGLGATRRAIETAFAQCGVSGQMAVRKAKGGDKDGHVFVTDGGHWILDAQLGRIVDPPSLAKALSAIPGVVEHGLFIGLASSAVLAGGEGIRVIERRKPKGD

SEQ ID NO: 3096 - DNA, 699 bp, Brucella suis
  CDS (1)..(699): transl_table=11
atggatgaagcacgcaagctcaagattgcggcggcagccgaagcgctgacttatgtaaaagacggaatgcggttgggcatcggcaccggctcgacggcggaagaatttgtgcgtctgctggctgaaaaggtgaagggtggctttcgcgtcattggtgttccgacttcggagcgcacagcaaaactgtgtgaggaactgggcgttgcgctcaccacactcgaagaaacgccgcatctggacctgacaattgacggtgcggatgaagttgacggcgaactcagccttatcaagggcggaggcggcgcgctgcttcgcgagaagattgttgctgcggcttccgattccatgatcgtgattgccgaccagtctaaagttgtggaaacgctggggcgttttcccctgccgattgaagtcaaccgcttcggccttggcgcgacaatccgggcgattgaggcggcggctgtaaagtgtggtcttgcagggccgctgaacctgcggttaaaagacggttcacctttcctcaccgacggtgggcactacatcgtggatgcatcttttggccgcattcccgatccaaagacattatctgacgctctcttcgccataccgggcgtagtcgagcatggacttttcatcggactggcgcgtgcggcgattatcgccggcaccgacggtatccgcaccatgaacaggtcttga

SEQ ID NO: 3097 - protein, 232 aa, Brucella suis
MDEARKLKIAAAAEALTYVKDGMRLGIGTGSTAEEFVRLLAEKVKGGFRVIGVPTSERTAKLCEELGVALTTLEETPHLDLTIDGADEVDGELSLIKGGGGALLREKIVAAASDSMIVIADQSKVVETLGRFPLPIEVNRFGLGATIRAIEAAAVKCGLAGPLNLRLKDGSPFLTDGGHYIVDASFGRIPDPKTLSDALFAIPGVVEHGLFIGLARAAIIAGTDGIRTMNRS

SEQ ID NO: 3098 - DNA, 672 bp, Buchnera aphidicola subsp
  CDS (1)..(672): transl_table=11
atgaatttaaacaaactaaaaaaaaaagcagcttgggcggcactagattatattgatcctggtacgatcattggagttggaaccggtacaactattttttatttcattgaagcactcggtacgataaaaaatttgatatatggagccgtatctagttctaattcgtctactgttttattaaaaaaacacggtatagaagtttttgatttaaaaaattttagttctcttgctatttatgtcgatagtgccgatgaaatcaataatcatatgcaaatgattaaaggtggaggaggtgctttaacaagagaaaaaattattgcttcaatgtcaaaaaaatttgtttgtattattgacaaatcaaaaaaagtagatgttcttggaacatttcctctaccaattgaaattattccaatggctctttcttatatttttcgagaaatgataaaaattggtggaacgccaaaatatcgtaaaaatgttattacggacaatggaaatataattatagatgtatataatttatgtataaaagatcctatatcgatggaaaaaaaaattaattcattacccggagtagttacagttggtttatttgcttctagaagcgccgatattgttttgattggaacacaaaaaggaatacgaactattaataaaaaagaaaatagataa

SEQ ID NO: 3099 - protein, 223 aa, Buchnera aphidicola subsp
MNLNKLKKKAAWAALDYIDPGTIIGVGTGTTIFYFIEALGTIKNLIYGAVSSSNSSTVLLKKHGIEVFDLKNFSSLAIYVDSADEINNHMQMIKGGGGALTREKIIASMSKKFVCIIDKSKKVDVLGTFPLPIEIIPMALSYIFREMIKIGGTPKYRKNVITDNGNIIIDVYNLCIKDPISMEKKINSLPGVVTVGLFASRSADIVLIGTQKGIRTINKKENR

SEQ ID NO: 3100 - DNA, 660 bp, Buchnera aphidicola subsp
  CDS (1)..(660): transl_table=11
atgaatttaaatgaattaaagaaaaaagcggcatgggctgcgctagattatatctatcctggaactgttataggagtaggaacaggtagtactgttttttattttattcaagctttaagtacagtaaaacatttaatatctggagctgtttctagttctaattcttctacggttttattgaaaaaaaacgggataagggtattagatttaaatacctttgacttcttagaaatttatgtagacagtgcagatgaaattaataatgacatgcaaatgattaaaggtggtggagcagccttgacaaaagaaaaaatcattgctgcgatgtcaaaaaaatttgtttgtattattgatgaatcaaaaaaagtaaatattttaggcacttttccattgcctattgaaattattcctatagcattttcttatatttcaaaagaaatattaaaaataggaggacagccaaaattaagagaaaatattataacagataatggtaatgtaattatagatgtttacaatttatttataaatgatcctatatcagtagaaaaaaaaataaattcactacctggagtagttagcgttggtttatttgcttcgagagttgcagatgttgttttaataggtactcaaaaaggagttgagattatcaaaaattaa

SEQ ID NO: 3101 - protein, 219 aa, Buchnera aphidicola subsp
MNLNELKKKAAWAALDYIYPGTVIGVGTGSTVFYFIQALSTVKHLISGAVSSSNSSTVLLKKNGIRVLDLNTFDFLEIYVDSADEINNDMQMIKGGGAALTKEKIIAAMSKKFVCIIDESKKVNILGTFPLPIEIIPIAFSYISKEILKIGGQPKLRENIITDNGNVIIDVYNLFINDPISVEKKINSLPGVVSVGLFASRVADVVLIGTQKGVEIIKN

SEQ ID NO: 3102 - DNA, 657 bp, Buchnera aphidicola subsp
  CDS (1)..(657): transl_table=11
atgaagacaaatgaattaaaaagattagtagcacgaaaagtggtagattacattaatcctggttcagttatcggaattggaactggttctaccgtttcatattttatagaagtattaagtactataaaaaatttaatttctggagcagtttctagttcgaacttttctactgcatgtttgaagagaataggtattcctatttatgatttaagtaaaattaattctttggtattatatattgatagtgcagatgaaattaatcctcaattacaaatgattaaaggaggaggagcagcactaactagagaaaagattattgctgcaactgctgaaaaatttatttgtattgcggatgagtctaaacaagtagaaatattaggaaaagttccattacctatagaaattattcctatggcacgttcttatatttcaaacgaaataattaagataggtggtatgccaaaatatcgaaaaaatgtaattacagacaatggaaatgttattattgacgtttttaatttagttataacagatcctgtatgtcttgaaaacaaaattaattcttttcctggagtagtaagtgtaggattattcgctactaggaaagctgatattgcgttaattggaacgtcatctggtgtacaagtaatttattaa

SEQ ID NO: 3103 - protein, 218 aa, Buchnera aphidicola subsp
MKTNELKRLVARKVVDYINPGSVIGIGTGSTVSYFIEVLSTIKNLISGAVSSSNFSTACLKRIGIPIYDLSKINSLVLYIDSADEINPQLQMIKGGGAALTREKIIAATAEKFICIADESKQVEILGKVPLPIEIIPMARSYISNEIIKIGGMPKYRKNVITDNGNVIIDVFNLVITDPVCLENKINSFPGVVSVGLFATRKADIALIGTSSGVQVIY

SEQ ID NO: 3104 - DNA, 696 bp, Burkholderia xenovorans
  CDS (1)..(696): transl_table=11
atgactcaagacgaactcaaacaactggtcggccaggccgccgccgactacgtcaacgccaacgtgcccgaaggctcggtgatcggcgtcggtaccggctccaccgctaactgcttcatcgacgcgctggccgccggcaagacgcgctatcgcggcgcggtgtcgagctcgctcgccaccaccgcgcggctgcagtcgcacggtttcaaggtgctcgatctcaacgaaatcgattcgctgccggtgtacgtggacggcgccgacgagatcgatcacagcggtgcgatgatcaagggcggcggcggcgcgctcacgcgcgagaagatcgtggcgtcggtgtcggacgtgttcgtatgtatcgcggacgccagcaagctggtggaaacgctcggcagtttcccgctgccgatcgaagtggtgccgatggcgcgcacctcgatcggccgccgcgtcacggcactcggcggcgtgccggtggtgcgcgtcactaaagaaggcgtgccgttcattaccgacaacggcaatgagatcatcgacgtcaagggtttgcgcatcagcgacccgcgcacgctggaaacgcatgtcaacgcgtggccgggcgtggtgacggtgggattgttcgcgagccgtggcgctgatctgtgtctgctcggcacggacaccggcgtcgacacgatcaggttcagcaagggttga

SEQ ID NO: 3105 - protein, 231 aa, Burkholderia xenovorans
MTQDELKQLVGQAAADYVNANVPEGSVIGVGTGSTANCFIDALAAGKTRYRGAVSSSLATTARLQSHGFKVLDLNEIDSLPVYVDGADEIDHSGAMIKGGGGALTREKIVASVSDVFVCIADASKLVETLGSFPLPIEVVPMARTSIGRRVTALGGVPVVRVTKEGVPFITDNGNEIIDVKGLRISDPRTLETHVNAWPGVVTVGLFASRGADLCLLGTDTGVDTIRFSKG

SEQ ID NO: 3106 - DNA, 783 bp, Candida glabrata
  CDS (1)..(783)
atgtcctacaccccattgccaaatattaacgacttcccaactctaggtaatcctctagaagatgccaagagagcagctgcttatcgtgctgttgatgaaaacttgaactttgacgaacacagaatcatcggtgtaggtagtggtagtactgttgtttacgttgccgagcgaattggtcaatacttgaaggatgagaagtaccatgacaaagtatccaaatttatctgtatccctactggttaccaatcccgtaacttgattcaagataatggtttaattctaggttctatcgagcagcacccccatgtagacattgcctttgacggtgctgacgaagttgaccacaacttgcaattgatcaaaggtggtggtgcatgcttgttccaagaaaaattggtatccactagtgcaaaaatcttcattgttgttgctgattccagaaaaaaatcggatactaacttggggataaattggaagagaggtgtgccaatagaaatcgtgccttcggcctggtcaagagttcaacatgacttgactagcattctccatgcaaactctgctcctgtaaggcaaggtggcagtgctaaagccggtccagttgtcactgataacatgaacttcttgatcgacgctgacttcggtgaaattcaagatccaaaagccctacatgaacaaatcaaaatgttggtgggtgtcgtcgaaactggtctgttcattgataacgctcacagagcttacttcggtaagcctgacggtagcgttgaagtcattgataagaaataa

SEQ ID NO: 3107 - protein, 260 aa, Candida glabrata
MSYTPLPNINDFPTLGNPLEDAKRAAAYRAVDENLNFDEHRIIGVGSGSTVVYVAERIGQYLKDEKYHDKVSKFICIPTGYQSRNLIQDNGLILGSIEQHPHVDIAFDGADEVDHNLQLIKGGGACLFQEKLVSTSAKIFIVVADSRKKSDTNLGINWKRGVPIEIVPSAWSRVQHDLTSILHANSAPVRQGGSAKAGPVVTDNMNFLIDADFGEIQDPKALHEQIKMLVGVVETGLFIDNAHRAYFGKPDGSVEVIDKK

SEQ ID NO: 3108 - DNA, 684 bp, Caulobacter crescentus
  CDS (1)..(684): transl_table=11
atgagcgccgacgaccagaagcgcatttcgggcgaagccgccgccgagcttgtcgagaacggcatggtggtcggcctgggcaccggctccacggccgcctggttcgtcaaggcgctggccgcgcgcggcctgaaagacattcgcggcgtgccgacctcggacgccaccgccgccctggcccgcgagctgggcatccccttggcggcgctggacgatgtgaagaccgtcgacctgaccgtggacggcgccgacgagatcggtccgggcctgtcgctgatcaagggcggcggcgcggcgctactgcgcgagaagctggtctgggaagcgtcgacccgctgtgtcgtcatcgctgacgcggccaagcgcgtgccggccttgggcaagttcccgctgcccatcgaggtggtgcgcttcggtcacgtccacaccggctatcgtctcgccgacatcgccgccgagttcgacctgccgcccccgcgcctgcgtacggccgagcgtggcatggtggtcaccgacggcggcaacctgatctacgacatggcctcgggcaagatcgaggatcccacggcgctggctgcggcgctgaagagcgtgaccggcgttgtcgaccacggcctgttccttgacctcgccgatgaggccctggtgggcacggacgagggcgtggtgcgcctgcagccctga

SEQ ID NO: 3109 - protein, 227 aa, Caulobacter crescentus
MSADDQKRISGEAAAELVENGMVVGLGTGSTAAWFVKALAARGLKDIRGVPTSDATAALARELGIPLAALDDVKTVDLTVDGADEIGPGLSLIKGGGAALLREKLVWEASTRCVVIADAAKRVPALGKFPLPIEVVRFGHVHTGYRLADIAAEFDLPPPRLRTAERGMVVTDGGNLIYDMASGKIEDPTALAAALKSVTGVVDHGLFLDLADEALVGTDEGVVRLQP

SEQ ID NO: 3110 - DNA, 702 bp, Chlamydophila abortus
  CDS (1)..(702): transl_table=11
gtgaaaaaagatccctatttagaagtaaaaaaacagttagctcttgaagcggcaaacttggtggagccaggaatgcttttgggattagggagtggctcgacatctagagaatttatcaaagctgttgctcacaagcataaacaagaaaatttagatattcgtgctgtggcttcttcaaaagagtcgcattctctagccaagagtctaggaattcctttggttgatgacgaagagttcacggaaatagatcttgctgttgatggtgcagatgaaatcgatcctcaattgcgcatgattaaaggtggaggtggagccatttttcgtgagaagatcttattacaatccagtcggcgacggttgatacttgcagatgaaagtaaacatgtgcaggttttagggaagtttggtcttcctatagaaattagtcctttcggtagatcttctattattgctactttgaaaaatttggggtatctaggaaatttaagaaaaaattctcatggaggattttttatcaccaataacagaaattatatttacgatattcatactccaaatgtatatcctcatcccgaggaagacctgctgaagctgctacaaattcatggtattattgaagtcgggtttgttatagcgagcgttgaagtatggtttggttatgccaacggtcagattggtaaaaagaacaccggtagagtatga

SEQ ID NO: 3111 - protein, 233 aa, Chlamydophila abortus
MKKDPYLEVKKQLALEAANLVEPGMLLGLGSGSTSREFIKAVAHKHKQENLDIRAVASSKESHSLAKSLGIPLVDDEEFTEIDLAVDGADEIDPQLRMIKGGGGAIFREKILLQSSRRRLILADESKHVQVLGKFGLPIEISPFGRSSIIATLKNLGYLGNLRKNSHGGFFITNNRNYIYDIHTPNVYPHPEEDLLKLLQIHGIIEVGFVIASVEVWFGYANGQIGKKNTGRV

SEQ ID NO: 3112 - DNA, 702 bp, Chlamydophila caviae
  CDS (1)..(702): transl_table=11
gtgaaagaggatccctatttagaagtaaaaagacatttagctcgtgaagctgctgctttggtgacctccggaatgcttttaggattgggaagtggttcgacctctagagaattcatcaaagctgttgctgaaaggaaaaagcaggagaatttagatattcgtgctgtggcgtcttcgaaagagtcttattccctagcaagtagtttagggatccccttgattgatgatgaagaattcatcaacacggatcttgctgttgatggtgctgatgagatagatccccaactgcggatgatcaaaggtggcggtggagccatttttcgagagaagatactactgcaatcgagtcaacgacgtttgatacttgctgatgagagtaaaagcgttaaggttttagggaagtttggtcttcctgtggagattagtccttttggaagatcttctattattgctaccttggagaattttggatatctgggaaatttaagaaagaatcctcgtgggggattttttatcaccaataacgggaattatatttacgatattcatactccaaatgtatacccccatcccgaggaagatctcctcaagctattacaaattcatggtattattgaagcagggtttgttatagagaatgttgaggtatggttgggttataccaacggtcagattggcaaaaagaacaccggtggattatga

SEQ ID NO: 3113 - protein, 233 aa, Chlamydophila caviae
MKEDPYLEVKRHLAREAAALVTSGMLLGLGSGSTSREFIKAVAERKKQENLDIRAVASSKESYSLASSLGIPLIDDEEFINTDLAVDGADEIDPQLRMIKGGGGAIFREKILLQSSQRRLILADESKSVKVLGKFGLPVEISPFGRSSIIATLENFGYLGNLRKNPRGGFFITNNGNYIYDIHTPNVYPHPEEDLLKLLQIHGIIEAGFVIENVEVWLGYTNGQIGKKNTGGL

SEQ ID NO: 3114 - DNA, 720 bp, Chlamydia muridarum
  CDS (1)..(720): transl_table=11
atgtctaaacaagtagctcattctttttcttctgaagatttttcctttataaaacaaaaattagcgcgagaggctgtggctttggtagagcctggaatgcgtgtaggattgggaagtggatctacggcccgagaatttattttggccttaggggagcgtgttcggaatgagcggctagcaattacagctgttgcctcctcaagaatatcacatttgttagcccaagcgttagggattccttttctagatcctgcattatcccaggagttagatttggttgtggatggggctgatgaagtagatgctaatttgcgtatgattaaggggggaggaggagctcttttccgggaaaaaattcttctacaaagtggtaaacgaaatattattctagtagatgagcgcaagctcgtttctgtattagggacatttcctctccctatcgaaatttctccttttggttgttcatcggtggagaaagtacttaatcaacaagggtatattggagattggcgtaaaacttctcacggagaacgttttatcacagataacggcaattatatctatgatgtgagctctccagattcttatcctcatccagaagaagatctgattagattgttacaaattcgtggcattattgatgtcgggtttgttatagcaaaggccgaggtgtgggtaggttacgccgatggtactgtggttcggaaagaaattacgtaa

SEQ ID NO: 3115 - protein, 239 aa, Chlamydia muridarum
MSKQVAHSFSSEDFSFIKQKLAREAVALVEPGMRVGLGSGSTAREFILALGERVRNERLAITAVASSRISHLLAQALGIPFLDPALSQELDLVVDGADEVDANLRMIKGGGGALFREKILLQSGKRNIILVDERKLVSVLGTFPLPIEISPFGCSSVEKVLNQQGYIGDWRKTSHGERFITDNGNYIYDVSSPDSYPHPEEDLIRLLQIRGIIDVGFVIAKAEVWVGYADGTVVRKEIT

SEQ ID NO: 3116 - DNA, 729 bp, Chlamydia trachomatis
  CDS (1)..(729): transl_table=11
atgtctaaacaacccgagaactctttttcttccgacaaatttttccctatcaagcagaaactagcgctagaggcagtagctttggtggagccaggaatgtgtgtggggttagggagcggctcgacggctagagagttcattttggctttaggagatcgtgttcggacagaacgtttggtaatcacagcggtagcctcttcaaggatatctcagctattagctgaagcagtggggattcctttatcggatcattctttattgcaagatgtagacttggtcgtggatggagcggatgaagttgatccttgcttacgtatgatcaaaggaggagggggagctcttttccgagaaaaaattcttcttcagagcgggaagcgcaatgttattctagtagatgaaaggaaacttgttcccacattagggaagttttcattgcctatagagattgctccttttggttgctcttctgtacagaggatattgaataaacagggatactttggagaatggagagaaacttctgcaggagaacgttttatcacggataatggcaattatatttacgatgtgcgtacacccgattcctatgcgaatcccgaagaggatatgattagactattacaaattcgtggcattattgatgtcgggtttgttatagcaaaagccgaggtgtgggtaggttacgccgacggttctattgtccgaaaaaaagaacataatgaatattga

SEQ ID NO: 3117 - protein, 242 aa, Chlamydia trachomatis
MSKQPENSFSSDKFFPIKQKLALEAVALVEPGMCVGLGSGSTAREFILALGDRVRTERLVITAVASSRISQLLAEAVGIPLSDHSLLQDVDLVVDGADEVDPCLRMIKGGGGALFREKILLQSGKRNVILVDERKLVPTLGKFSLPIEIAPFGCSSVQRILNKQGYFGEWRETSAGERFITDNGNYIYDVRTPDSYANPEEDMIRLLQIRGIIDVGFVIAKAEVWVGYADGSIVRKKEHNEY

SEQ ID NO: 3118 - DNA, 660 bp, Chromobacterium violaceum
  CDS (1)..(660): transl_table=11
atgctgacccaggatcaactgaaactcgccgtcgccaagaaggcgctggaattcgtgccggaagacgccatcatcggcgtgggcaccggcagcaccgtcaacctgttcatcgaggaactggccggcatcaagggtcgcatcaagggcgctgtgtccagctcggaggcttccaccgcccgcctgaaggcccatcatatccaggtgttcgatctgaacgaagtggagaaactgtcggtctacatcgacggcgccgacgagatcaaccaccacctgcacatgatcaagggcggcggcgcggcgctgacgcgcgagaagatcgtcgccggcgtcgccgacgagttcatctgcatcgccgacgagaagaagtacgtgaccatgctgggcgccttcccgctgccgatcgaggtgatcccgatggcgcgcagctacgtcgcgcgcgagctggtgaagctgggcggccacccggagctgcgccagggcgtgaccaccgacaacggcaacgtgattctggacgtgcacggcctgcagatcatgaagccggtggagctggaggaaaccatcaaccacatcgccggcgtcgtcacctgcggcctgttcgcccgccgccgcgccgacgtgctgctgctgggcaagcaggacggcgtggaagtgctgcgctga

SEQ ID NO: 3119 - protein, 219 aa, Chromobacterium violaceum
MLTQDQLKLAVAKKALEFVPEDAIIGVGTGSTVNLFIEELAGIKGRIKGAVSSSEASTARLKAHHIQVFDLNEVEKLSVYIDGADEINHHLHMIKGGGAALTREKIVAGVADEFICIADEKKYVTMLGAFPLPIEVIPMARSYVARELVKLGGHPELRQGVTTDNGNVILDVHGLQIMKPVELEETINHIAGVVTCGLFARRRADVLLLGKQDGVEVLR

SEQ ID NO: 3120 - DNA, 657 bp, Colwellia psychrerythraea
  CDS (1)..(657): transl_table=11
atgactcaagatgaaatgaaaaacgcagccgccattaaggcattagaattcattgaaaatgatactatcgtcggtgttggcactggctcaacagttaactttttcattgaagctctagcctcgatgaaagataaaatagcaggtgctgtttctagctcagaagagtcaactaagcgtttaaaagcacacggtattgaggtatttgatttaaacagtgttgatgttttagatgtatacgttgacggtgccgatgaaatcactcgtcatatgtcgatgatcaaaggcggtggcgcagcattaacccgtgaaaaaatcgtggcggcagtcgccaagaaatttatttgcattgccgacgattccaaacaagtaaaagtattgggtaactttcctttgcctgttgaagtaatacctatggcgcggagttatgtcgcacgtgaattagttaaattaggtggcgacccagtttaccgtcaaggtgtgaccacagataatggcaacgttatccttgatgtgtacaatctcgaaattcttgatccaaaagcactagaaactcaaattaacgctattgttggcgttgtgactaatggtttgtttgcacttcgtggcgctgacatattagtacttggtagcaaagatggaattcaggttatccaataa

SEQ ID NO: 3121 - protein, 218 aa, Colwellia psychrerythraea
MTQDEMKNAAAIKALEFIENDTIVGVGTGSTVNFFIEALASMKDKIAGAVSSSEESTKRLKAHGIEVFDLNSVDVLDVYVDGADEITRHMSMIKGGGAALTREKIVAAVAKKFICIADDSKQVKVLGNFPLPVEVIPMARSYVARELVKLGGDPVYRQGVTTDNGNVILDVYNLEILDPKALETQINAIVGVVTNGLFALRGADILVLGSKDGIQVIQ

SEQ ID NO: 3122 - DNA, 909 bp, Cryptococcus neoformans
  CDS (1)..(909)
atgccctccccggccgtagaccttctcaagcaaaagacagcaagcctgccgaatgcccctatcagcgtcgtcgctgccaacacctttgtccctcctactcagcctgtgacggctggaaaccagctgcctacctctgtccctctccctgtcctgcctgcagttgaagctgccaaacgtttggcagcatatgccgctgtggaccgacacatcgcacacgagcacaaggtcattggtatcggatcaggatccactgtcccctacgtcgtggacagaatacttgctcaagggtttgaagccaataaagaccgggttttccttcctaccggcttccagtccaaagagcttatcgttaaagctggcttgactttgggcgacgtggatcaatatgctcgaatcgacgtgaccattgacggtgccgatgaggtcgacaacgagctcaactccatcaagggcggcggcgcttgtcagcttcgtgaaaaggtcctcgcagaggctgctgatacgtggatcatcgtggccgactaccgcaagaactctgaagttctcggcacatcttggactaaaggaattcccatcgaagtcgtcccctttgcgtacgccaaagtcctcaccaacctcgcccacatgggctccccacatgttcttcccaacggtcagcctggtcttagcttgcgtatgggtaagatgaaggctggacctgtggtcagcgataatggaaactttatcattgatgctcccttcgctgaggaattgatgcgacagcctgaagagctgttgcacaagatcaaaatgttgaccggtgtcgtcgaagtcggacttttctgtggcatggccaaggctgcgtactttggtaacgaggatggctccgttacaatccgttctgatgacggtaccatttctcagctgtaa

SEQ ID NO: 3123 - protein, 302 aa, Cryptococcus neoformans
MPSPAVDLLKQKTASLPNAPISVVAANTFVPPTQPVTAGNQLPTSVPLPVLPAVEAAKRLAAYAAVDRHIAHEHKVIGIGSGSTVPYVVDRILAQGFEANKDRVFLPTGFQSKELIVKAGLTLGDVDQYARIDVTIDGADEVDNELNSIKGGGACQLREKVLAEAADTWIIVADYRKNSEVLGTSWTKGIPIEVVPFAYAKVLTNLAHMGSPHVLPNGQPGLSLRMGKMKAGPVVSDNGNFIIDAPFAEELMRQPEELLHKIKMLTGVVEVGLFCGMAKAAYFGNEDGSVTIRSDDGTISQL

SEQ ID NO: 3124 - DNA, 720 bp, Debaryomyces hansenii
  CDS (1)..(720): transl_table=12
atgtctagtggagcatcattggtagaaaaagctaagaaaagtgccgcataccaggcggtggatgagaatttcccggaaggagccaaggtggttggtgtgggctcagggtcgacggtgatttatgttgctgaaagaataagtcaattgaagaacaaggagtcgtttgtgtgcgttcctacggggttccaatcgaagcaattgatcattgacgccggattgagattgggaacgattgaacagtaccctgaggtggacattgcgttcgatggtgcggatgaggtggacacggagttgaatttgatcaaggggggaggtgcatgtcttttccaggagaagttggtggctgctgctgctagtaagtttgtgattgtggccgatttccgtaagagatcaccctcgaagttgggtatacagtggagaaagggagtacctattgagattgtgccatgtgcgtatgcgaaggtgtccaaggacttggaagccatgggtgcgaagaaagttgaattgagacaggggggttcagccaaggcagggccagtagtgaccgataacaataactttttgattgatgctgatttcggcgagatagaagatcctgccaaattgcacaccgacatcaaacaattggtcggggtggtggaaaccgggttgtttgtgcaaatggcctacaaaacgtactttggagaggaatctggggaagtcaagtgctggtcaaagtaa

SEQ ID NO: 3125 - protein, 239 aa, Debaryomyces hansenii
MSSGASLVEKAKKSAAYQAVDENFPEGAKVVGVGSGSTVIYVAERISQLKNKESFVCVPTGFQSKQLIIDAGLRLGTIEQYPEVDIAFDGADEVDTELNLIKGGGACLFQEKLVAAAASKFVIVADFRKRSPSKLGIQWRKGVPIEIVPCAYAKVSKDLEAMGAKKVELRQGGSAKAGPVVTDNNNFLIDADFGEIEDPAKLHTDIKQLVGVVETGLFVQMAYKTYFGEESGEVKCWSK

SEQ ID NO: 3126 - DNA, 681 bp, Deinococcus radiodurans
  CDS (1)..(681): transl_table=11
atggaccttgaagccctgaaaaaagaagccgctttgcgctccgtcgccctggtccagagcgggcagcgggtcggcctgggcaccggcagcaccgccaaatacgcgattgaagaactaggacgcaagctagcggcgggcgagctgagcggcatcgtgggcgtgtccaccagcgaggcgagcgaaaaactggcgcgcgaggtcggcattccgaccgagccgctcgacccgcgcccgctggacatcgctattgacggcgctgacgagattgcgcccaatctggacctcgtcaaggggctgggcggcgccctggtgcgcgagaagatgaccgaggtgcaggcgaagcggctgattatcatcgctgaccacaccaaactggtgacccggctgggcgagaaggcaccgctgcccatcgagattgtgcccttcggctttctctccaccatcgagcggctgcgcgaatttctgcccggtggccgtctgcggcagcccggcgcgcagccctacgtgaccgacaacggcaactacatcttcgacgcgcagttgcccgccgagtttgacgcccgcgaactggaacgccgcatcaagggcacgctcggggtggtggacaccgggttgttcctgggaatggccgagcgggccttcgtggccgcgccggacggggtgcaggagctgacgcgctga

SEQ ID NO: 3127 - protein, 226 aa, Deinococcus radiodurans
MDLEALKKEAALRSVALVQSGQRVGLGTGSTAKYAIEELGRKLAAGELSGIVGVSTSEASEKLAREVGIPTEPLDPRPLDIAIDGADEIAPNLDLVKGLGGALVREKMTEVQAKRLIIIADHTKLVTRLGEKAPLPIEIVPFGFLSTIERLREFLPGGRLRQPGAQPYVTDNGNYIFDAQLPAEFDARELERRIKGTLGVVDTGLFLGMAERAFVAAPDGVQELTR

SEQ ID NO: 3128 - DNA, 657 bp, Dichelobacter nodosus
  CDS (1)..(657): transl_table=11
atgaatcaacagcttctcaaggaaaaagtcgctgctgccgtattagaacatgtgcctgaaaatattacgttgggcgtgggcagcggttcaacggtgttgtgttttattgaggcgttaaaacaggcaaaaagacaatttcgcgatattgttgccgcttcggaaacgtccagcaaagcattggaagcggcgggatttcgggtgcgcgatttaaatgcctgcgatccgccggatatttatgtggacggcgccgatgaaattaatgatgacaaaatcatgataaaaggcggcggcgcggcgttgacacgggaaaaaatcatcgcgtcggcggcaaaagaatttatttgcatcattgatgaatcaaaaaaagtggcgcaattaggacgttttccagttgccgttgaagtgattccgatggcgagaagttacgttgcgcgggaaattgtgaaattaggcgccgaaccgcgctggcggcagggcgtggtgacggataatggtcattggattttagatgtgcattatttagatttaacggctgccgaacggatggaagcgcgtattaacacgattgccggcgtggtggaatgcggcatttttgcgcaaagacgggcggataaagttttaatgagccaaagcgacggggaaattgtgctttggtaa

SEQ ID NO: 3129 - protein, 218 aa, Dichelobacter nodosus
MNQQLLKEKVAAAVLEHVPENITLGVGSGSTVLCFIEALKQAKRQFRDIVAASETSSKALEAAGFRVRDLNACDPPDIYVDGADEINDDKIMIKGGGAALTREKIIASAAKEFICIIDESKKVAQLGRFPVAVEVIPMARSYVAREIVKLGAEPRWRQGVVTDNGHWILDVHYLDLTAAERMEARINTIAGVVECGIFAQRRADKVLMSQSDGEIVLW

SEQ ID NO: 3130 - DNA, 660 bp, Edwardsiella ictaluri
  CDS (1)..(660): transl_table=11
atgacgcaggatgaattgaaaaaagcagtgggctgggcagcgctgaagtatgtgcgccctgggaccattgtcggggtaggcaccggctccaccgcctcacactttattgatgcgctggcgaccatgaagggccagatcgagggtgcggtctccagctctgatgcctccaccgccaggctgaaaagcctggggatcccggtctttgacctcaatgaggtggattcgctggatatctatgtggatggggccgatgagatcaacggcgccatgcagatgatcaagggcggcggcgccgcgctgacacgtgagaagatcgtggcggcggtggccaagaagttcgtctgtatcgtcgatgcctctaaacaggtcgatattctgggtagcttcccgctaccggtcgaggtgatcccgatggcgcgcgcctatgttgcccgtgagctggtgaagctgggcgggcagccggtgtatcgtcagggcgtactgaccgacaatggcaacgtgatcctggatgtacacaacctgcagatcatggagccgtgcaaactggagaacgccattaacgccatcgccggcgtcgtgacggtggggctgtttgccaaccgcggtgccgacgttgcgctggtcggctgcgcggatggcgtcaaaacgctgaccctataa

SEQ ID NO: 3131 - protein, 219 aa, Edwardsiella ictaluri
MTQDELKKAVGWAALKYVRPGTIVGVGTGSTASHFIDALATMKGQIEGAVSSSDASTARLKSLGIPVFDLNEVDSLDIYVDGADEINGAMQMIKGGGAALTREKIVAAVAKKFVCIVDASKQVDILGSFPLPVEVIPMARAYVARELVKLGGQPVYRQGVLTDNGNVILDVHNLQIMEPCKLENAINAIAGVVTVGLFANRGADVALVGCADGVKTLTL

SEQ ID NO: 3132 - DNA, 660 bp, Enterobacter cloacae
  CDS (1)..(660): transl_table=11
atgacgcaggatgaactgaaaaaagcagtaggatgggccgctctccagtacgtgcagccgggtaccattgttggtgtcggtacgggatcaaccgcggcacactttatcgatgcgctgggcacgatgaaggggcaaatcgagggcgcggtttccagctctgatgcttccacggaaaagctgaaaagcctcggcattaccgttttcgatctcaacgaagtggatcgtctggggatttacgttgatggtgcggatgaaatcaacggccacatgcagatgatcaaaggcggcggcgcggcgctgacgcgcgagaagatcatcgcctccgttgcggacaagttcatctgcatcgcggatgcctccaagcaggtcgacattctgggtaatttcccactgccggtcgaagtgatcccaatggcgcgtagcgcggttgcccgtcagctggtgaagctgggcggtcgtccggaataccgtcagggcgtagtcaccgataacggtaacgtgatcctcgacgttcacggtctggaaattcttgacgcgattgcgctggaaaatgccatcaacgctatcccaggcgtagtgaccgtagggctattcgccaaccgtggcgcggatgtggcgctgatcggcaccgctgacggcgtgaaaaccatcgtaaaatga

SEQ ID NO: 3133 - protein, 219 aa, Enterobacter cloacae
MTQDELKKAVGWAALQYVQPGTIVGVGTGSTAAHFIDALGTMKGQIEGAVSSSDASTEKLKSLGITVFDLNEVDRLGIYVDGADEINGHMQMIKGGGAALTREKIIASVADKFICIADASKQVDILGNFPLPVEVIPMARSAVARQLVKLGGRPEYRQGVVTDNGNVILDVHGLEILDAIALENAINAIPGVVTVGLFANRGADVALIGTADGVKTIVK

SEQ ID NO: 3134 - DNA, 681 bp, Enterococcus faecalis
  CDS (1)..(681): transl_table=11
atgaatctgaaacaaatggtaggaatcgaagctgcaaaatatgtagaagacggcatgattgtcggtttgggtactggctcaacagcaaaatttatggtagacgaaattggtcgtcgcgtaaaagaagaaggattgtcaatcgtaggggttactacttcaaaagaaacagagaaacaagccttggccttgggcattcctttaaaaagtattgatgaggttccgtatgtggatcttacgattgatggcgccgatgaaatcagcgctgattttcaaggaatcaaaggcggtggcgctgccttactttttgaaaaaattgtggccacttattcaaagaaatgtatttggattgtggataaatcaaaaatggtggacgatttaggggctttcccgcttccagttgaggttgttccttatggcagccgccaactagtgcatttatttgaagaaaaaggctatcacccaacacttcgtttaaacgctgctggcgaaacattaataacagatggaggccaccatatcatcgatttgcatttagaaaaaattacagatccagaagctttgggttcttatttagacaacttggttggcgtcgttgaacacggcttatttttaaatatggtttctatggtaatcgtcggttatgaagatggaccgaaaaccttacatgttcccgcacgttaa

SEQ ID NO: 3135 - protein, 226 aa, Enterococcus faecalis
MNLKQMVGIEAAKYVEDGMIVGLGTGSTAKFMVDEIGRRVKEEGLSIVGVTTSKETEKQALALGIPLKSIDEVPYVDLTIDGADEISADFQGIKGGGAALLFEKIVATYSKKCIWIVDKSKMVDDLGAFPLPVEVVPYGSRQLVHLFEEKGYHPTLRLNAAGETLITDGGHHIIDLHLEKITDPEALGSYLDNLVGVVEHGLFLNMVSMVIVGYEDGPKTLHVPAR

SEQ ID NO: 3136 - DNA, 660 bp, Erwinia carotovora subsp
  CDS (1)..(660): transl_table=11
atgacgcaagatgaactgaaaaaagcagtgggatgggcagcgcttgactatgttcgccctgacaccatcgtgggagtaggaaccggatcgacggcagcacactttattgatgcgctgggttcgataaaacatcaaatcaaaggcgcggtttccagttcggatgcttcaacggaaaaattgaaaagtctgggcattcccgtttttgatgccaatgatgttgattcgctggatgtttatgtggatggcgcggatgaaatcaacggtcatatgcagatgatcaaaggcggtggtgctgctctgacccgtgagaaaatcatttcggcactgtcgcgccagttcatctgcattgttgatgcgtcaaagcaggttgatgtactgggtaaattcccgttgccagttgaagtcattccaatggcgcggtcttacgtggcgcgtgaactggtgaagctgggtggtcagccggaatatcgtcaaggtgtagtgacggataatggcaacgtcattctggatgtacacaacctgaatatcatggatgcggtcgcggtagaaaaccacattaatggtatcgctggcgtcgtgaccgttgggctgtttgccaaccgcggtgcggatgtggcgttagtcggtacggctgatggtgtaaaaaccgtcactaaatga

SEQ ID NO: 3137 - protein, 219 aa, Erwinia carotovora subsp
MTQDELKKAVGWAALDYVRPDTIVGVGTGSTAAHFIDALGSIKHQIKGAVSSSDASTEKLKSLGIPVFDANDVDSLDVYVDGADEINGHMQMIKGGGAALTREKIISALSRQFICIVDASKQVDVLGKFPLPVEVIPMARSYVARELVKLGGQPEYRQGVVTDNGNVILDVHNLNIMDAVAVENHINGIAGVVTVGLFANRGADVALVGTADGVKTVTK

SEQ ID NO: 3138 - DNA, 693 bp, Gloeobacter violaceus
  CDS (1)..(693): transl_table=11
gtggacctcgatatcctcaagcaaacggcggctcggcgcgctgtcgagcttgtcgaagatggcatggtggtcgggctgggcaccggctcgaccgccgcatttgcagtgagcgtcctcgccgagcgagtgcgcctggggctgcgggtggtggggatccccacctcggagcgcaccgcccgccaagctgaggcggagggtattgttctggggacactggcggagcaatccagggtcgatctcaccatcgatggggcggacgaggtggccctgggggagctggcccttatcaagggcctgggtggtgctttgttgcgcgaaaagattgtcgctgccgcgagcgagaggctgattatcatcgtcgatgccaccaagctcgtcgaacagcttggtagccacggcccgctgccggtggaggtggcgccgtttggctggcaggcgaccgcccgcgccctggagcggctcggtgccgaggtgaatctgcgagcccagcatggacaagcgtttctcaccgacggcggccactacatccttgattgtcgttttggaccgatcgcccggccggccgaactcgaagcggccatcgaccgtatcccgggggtggtggaaagcggtctgtttgtcggcatggcaagcgcggtgatcgtagccgacgaggggggtatcgaagtgctcacaccttctgcagcgccttga

SEQ ID NO: 3139 - protein, 230 aa, Gloeobacter violaceus
MDLDILKQTAARRAVELVEDGMVVGLGTGSTAAFAVSVLAERVRLGLRVVGIPTSERTARQAEAEGIVLGTLAEQSRVDLTIDGADEVALGELALIKGLGGALLREKIVAAASERLIIIVDATKLVEQLGSHGPLPVEVAPFGWQATARALERLGAEVNLRAQHGQAFLTDGGHYILDCRFGPIARPAELEAAIDRIPGVVESGLFVGMASAVIVADEGGIEVLTPSAAP

SEQ ID NO: 3140 - DNA, 696 bp, Gluconobacter oxydans
  CDS (1)..(696): transl_table=11
atgagcggtacggatatgaacgttcacaagcgtacggccgcacgtgaagccgcggatatggtcaaaagcggtatggtcgtggggctcgggaccggcagcacggcggcgtacatgatcgagcgtctgggcgagcgcgttgcggaaggcctggagatctttggcattccgacctcggatgacagcgaggacaaggcgctcaaggccggtattccgctgaccgatttcagcgcgcatcgccgcatcgatattgccattgatggcgcggacgaggtccagcgtggttcgctcaatcttatcaaggggctgggcggggcgttgctgcgtgaaaagattgtggcgcaggcagccaagcgtttcgtggtgatcgtggacggcaccaagcccgtggacctgctgggcgaacgggcgccggtgccggtggaagtcatttctttcggctgggaatgtacggcggaacgtctggcggcctgtggcgcacgcggcgtgaagccgaggacggaccgggccggatcgctgttcgtaaccgataccggcaacatgattctggactgccattttggaccgatcgaaaagcccgaggaactggctgagaaaatcgaccggatcgtgggtgtcgtggagcacggcatgtttctcaacatggcgtccgaagtcctcgtggcgacgccggacggtgtggagcactgggagccatga

SEQ ID NO: 3141 - protein, 231 aa, Gluconobacter oxydans
MSGTDMNVHKRTAAREAADMVKSGMVVGLGTGSTAAYMIERLGERVAEGLEIFGIPTSDDSEDKALKAGIPLTDFSAHRRIDIAIDGADEVQRGSLNLIKGLGGALLREKIVAQAAKRFVVIVDGTKPVDLLGERAPVPVEVISFGWECTAERLAACGARGVKPRTDRAGSLFVTDTGNMILDCHFGPIEKPEELAEKIDRIVGVVEHGMFLNMASEVLVATPDGVEHWEP

SEQ ID NO: 3142 - DNA, 660 bp, Haemophilus ducreyi
  CDS (1)..(660): transl_table=11
atgactcaacaagaaatgaaaaaaattgcggctcaagctgctcttcaatttgttaaaccagatacgataatcggtgtaggaagtggttccactgtcaattgctttattgatgcccttgcctcaatcaaagatgagattaaaggtgccgtagcggcctctaaagcatcagaggatcagttgcgtgcaatgggtattgaggtgtttaacgctaatgaagttgcgggattagatgtatatattgatggtgctgatgaaatcacgccacaaggtgcaatgataaaaggtggcggcgcagcattaacgcgtgaaaaaatcgtcagttcgcttgctaaacaatttatctgtatggtcgatagttcgaaacaagttgacgtattaggttctagttttccattgccggtggaagtgatcccgatggctcgttcgtatgttgcccgccaactagttgccttaggtggatcacccgaatatcgcgaaggtgttgttactgataatggcaatgttattttagatgtgcataattttaatatttatgaaccgcttaaaatggaacacactattaataatattgctggcgtagtaaccaatggtatttttgcgcaacgttatgccaatatcatcattgtaggcacagctgaaggtgcaaaaattatcaaatag

SEQ ID NO: 3143 - protein, 219 aa, Haemophilus ducreyi
MTQQEMKKIAAQAALQFVKPDTIIGVGSGSTVNCFIDALASIKDEIKGAVAASKASEDQLRAMGIEVFNANEVAGLDVYIDGADEITPQGAMIKGGGAALTREKIVSSLAKQFICMVDSSKQVDVLGSSFPLPVEVIPMARSYVARQLVALGGSPEYREGVVTDNGNVILDVHNFNIYEPLKMEHTINNIAGVVTNGIFAQRYANIIIVGTAEGAKIIK

SEQ ID NO: 3144 - DNA, 660 bp, Haemophilus influenzae
  CDS (1)..(660): transl_table=11
atgaatcaattagaaatgaaaaaactcgccgcacaagctgcattagaatatgtaacagctgacacaattgttggcgtgggcagtggctccacagtgaactgctttattgaagctttgggtacaatcaaaaataaaattcaaggcgtagttgcggcttcaaaagcatcagaagaattattacgtaaacaagggatcgaagtatttaatgcaaatgatgtctctagcttagatatttatgtggatggtgcagatgaaatcaatccacaaaaaatgatgattaaaggcggcggtgcggcacttactcgtgaaaaaatcgttgcggcattagcgaaaaaatttatttgtattgtagattctagtaaacaagtagatgtgttaggttcgactttcccattgccagttgaagttattccaatggctcgttcacaagtgggcagaaaattagtcgcacttggtggcgcacctgagtatcgtgaaggcgtggttacagataatggcaatgtgattttagatgtacacaacttcagtattttaaatccagttgaaatggaaaaagaattaaacaatgttgcaggtgtcgtcactaatgggatattcgcattgcgtggcgcagatgttgtaatcgtcggcacgcctgaaggtgccaaaattattgactaa

SEQ ID NO: 3145 - protein, 219 aa, Haemophilus influenzae
MNQLEMKKLAAQAALEYVTADTIVGVGSGSTVNCFIEALGTIKNKIQGVVAASKASEELLRKQGIEVFNANDVSSLDIYVDGADEINPQKMMIKGGGAALTREKIVAALAKKFICIVDSSKQVDVLGSTFPLPVEVIPMARSQVGRKLVALGGAPEYREGVVTDNGNVILDVHNFSILNPVEMEKELNNVAGVVTNGIFALRGADVVIVGTPEGAKIID

SEQ ID NO: 3146 - DNA, 660 bp, Haemophilus influenzae
  CDS (1)..(660): transl_table=11
atgaatcaattagaaatgaaaaaactcgccgcacaagctgcattacaatatgtaaaagcagatacgattgttggggtgggaagtggctccacagtgaactgctttattgaagctttaggtacaatcaaagataaaattcaaggtgccgttgcggcttcaaaagaatcagaagaattattacgtaagcaaggtatcgaagtatttaatgcaaatgatgtctctagcttagatatttatgtggatggtgcggatgaaatcaatccacaaaaaatgatgattaaaggcggcggcgcagcactcactcgtgaaaaaatagtcgctgcattagcgaaaaaatttatttgtattgtggattcaagtaagcaagtggatgtgttgggttcaactttcccattaccagttgaagtgattcctatggcacgctcacaagtaggcagaaaattagccgcacttggtggctcacctgaatatcgtgaaggggtggtgactgacaacggcaatgtgattttagatgtacacaacttcagtattttaaatccagtcgaaattgaaaaagaattaaacaacgttgcaggtgtcgtcactaatgggatattcgcgttacgtggtgcagatgttgtgatcgtcgggacgcctgagggtgccaaagttattgactaa

SEQ ID NO: 3147 - protein, 219 aa, Haemophilus influenzae
MNQLEMKKLAAQAALQYVKADTIVGVGSGSTVNCFIEALGTIKDKIQGAVAASKESEELLRKQGIEVFNANDVSSLDIYVDGADEINPQKMMIKGGGAALTREKIVAALAKKFICIVDSSKQVDVLGSTFPLPVEVIPMARSQVGRKLAALGGSPEYREGVVTDNGNVILDVHNFSILNPVEIEKELNNVAGVVTNGIFALRGADVVIVGTPEGAKVID

SEQ ID NO: 3148 - DNA, 660 bp, Haemophilus somnus
  CDS (1)..(660): transl_table=11
atggatcagttaagcatgaaaaaaatggctgctcaagctgcactgcaatatgttaagcctgatagcattattggcgtaggaagcggttcaactgtcaactgttttattgaagtattaggtacaataaaagaaacaatcaaaggtgctgtcgcagcttcaaaagcatcagaagaattattactccgacaaggtatcgaggtattcagtgcaaatgatgtatccggtttagatatttatgtcgatggtgcagatgaaattaatccgcaaaaaatgatgattaaaggtggcggagcagcattgacacgtgaaaaaattgtagctgcattggcaaaaaaattcatatgtatagtagacagttctaaacaagtggatgtattaggctcaacgttcgctttgccgatagaggtgattccaatggctcgctctcaagttgcacgcaaattagtggcgttgggcggttcacctgaatatcgtgaaaatgtggttacagataatggtaatgttattttagatgtatataactttaaaattatgaatccgatagaaatggaaaaagaattgaataatgtggccggcgtggtaacaaatgggatttttgctttacgttctgcagatattgttattgtaggtacgccggagggtacaaaaattattgaataa

SEQ ID NO: 3149 - protein, 219 aa, Haemophilus somnus
MDQLSMKKMAAQAALQYVKPDSIIGVGSGSTVNCFIEVLGTIKETIKGAVAASKASEELLLRQGIEVFSANDVSGLDIYVDGADEINPQKMMIKGGGAALTREKIVAALAKKFICIVDSSKQVDVLGSTFALPIEVIPMARSQVARKLVALGGSPEYRENVVTDNGNVILDVYNFKIMNPIEMEKELNNVAGVVTNGIFALRSADIVIVGTPEGTKIIE

SEQ ID NO: 3150 - DNA, 660 bp, Haemophilus somnus
  CDS (1)..(660): transl_table=11
atggatcagttaagcatgaaaaaaatggctgctcaagctgcactgcaatatgttaaacctgatagtattattggcgtaggaagcggttcaactgtcaattgttttattgaagtattaggtacaataaaagaaacaatcaaaggtgctgtcgcagcttcaaaagcatcagaagaattattactccgacaaggtatcgaggtattcagtgcaaatgatgtatccggtttagatatttatgtcgatggtgcagatgaaattaatccgcaaaaaatgatgattaaaggtggcggagcagcattgacacgtgaaaaaattgtagccgcattggcaaaaaaattcatatgtatagtagacagttctaaacaagtggatgtattaggctcaacgttcgctttgccgatagaggtgattccaatggctcgctctcaagttgcacgcaaattagtggcgttgggcggttcacctgaatatcgtgaaaatgtggttacagataatggtaatgttattttagatgtatataactttaaaattatgaatccgatagaaatggaaaaagaattgaataatgtggccggcgtggtaacaaatgggatttttgctttacgttctgcagatattgttattgtaggtacgccggagggtacaaaaattattggataa

SEQ ID NO: 3151 - protein, 219 aa, Haemophilus somnus
MDQLSMKKMAAQAALQYVKPDSIIGVGSGSTVNCFIEVLGTIKETIKGAVAASKASEELLLRQGIEVFSANDVSGLDIYVDGADEINPQKMMIKGGGAALTREKIVAALAKKFICIVDSSKQVDVLGSTFALPIEVIPMARSQVARKLVALGGSPEYRENVVTDNGNVILDVYNFKIMNPIEMEKELNNVAGVVTNGIFALRSADIVIVGTPEGTKIIG

SEQ ID NO: 3152 - DNA, 687 bp, Haloarcula marismortui
  CDS (1)..(687): transl_table=11
atgaaacagggcggctccgacgcggcgaaacaggcagcgggggaatcagcggctgaagcggtcgaggacgccacggtcgttggcctcggcacggggtcaacggcagcctacgctatccgcgctatcggacaggcggtcgacgccggcctcgatgtcgtcggcgtccccacgtcgtttcagtcccgccagctggcccgtgactgtggcatcccgctggcggacctcgacgacgtgtcggtcgacctcgccatcgacggggccgacgaggtggccagcggcaacctgatcaaaggcggtggcgcggcgcacgcccgggagaagatagtcgacgcgagcgccgaccgcttcctcgtcgtcgctgatccgacgaaagaggcggccgtactctcatatcctgtccccgtcgaggtactcccgatggcccgctcgacagtcgtcacggcagtcgaagaattgggtggtgacccaacactccgccgtgcagaacgtaaggacggccccgtcgtcaccgacaacggaaatctcgtgctcgactgcgacttcaattccatccacgaccccgccgcactcgccagcgacctcgccgcgctgcccggtgttgtcgagcacgggctgttcgtcggtatggctgacgagattcacgtcggcactgctgatggcgtcaccgtccgaacgctttcgaaatag

SEQ ID NO: 3153 - protein, 228 aa, Haloarcula marismortui
MKQGGSDAAKQAAGESAAEAVEDATVVGLGTGSTAAYAIRAIGQAVDAGLDVVGVPTSFQSRQLARDCGIPLADLDDVSVDLAIDGADEVASGNLIKGGGAAHAREKIVDASADRFLVVADPTKEAAVLSYPVPVEVLPMARSTVVTAVEELGGDPTLRRAERKDGPVVTDNGNLVLDCDFNSIHDPAALASDLAALPGVVEHGLFVGMADEIHVGTADGVTVRTLSK

SEQ ID NO: 3154 - DNA, 678 bp, Halobacterium salinarium
  CDS (1)..(678): transl_table=11
atgaaacaggctggcgggagcgccgagcaaaagcggcgggccggggaggcggcggtggccgaggaagtgaccgagggggcggtcgtggggctcggaaccgggagcacggtggcgcacgcgatccgcgcgctgggtgcggaagcgtcggacgtgtcgggggtagcgacgtcgttcgagtcccgacggcgcgccgtcgacgccggagtgacggtaacgagtctagaggcggcgtcggtggacgtcgcgatcgacggcgccgatcaggtggccgacggcgtgctggtgaaaggtggcggggcggcccacacgcgcgagaaatacgtggcggccagcgccgaccgcttcgtggtggtcgccgatccgtccaaggagagcgacgtggtggacgtgccggtgccggtggcggtggtgcctgacgcctggccggtggtcgtcgatcgggttgaggcgctgggcgggacggcgacgctgcgggacgccgagcggaaggacgggccggtggttacggacaccgggagcctcgtggtggactgcgatttcggggccatcgagacccccgaggcggtggcggcgtcgctgtctgcggttccgggcgtcgtcgagcacgggctgttcgtggggatggctgacgccgtctacgtgggaaccgacgacggcgtccgcgtgcgggacccgtaa

SEQ ID NO: 3155 - protein, 225 aa, Halobacterium salinarium
MKQAGGSAEQKRRAGEAAVAEEVTEGAVVGLGTGSTVAHAIRALGAEASDVSGVATSFESRRRAVDAGVTVTSLEAASVDVAIDGADQVADGVLVKGGGAAHTREKYVAASADRFVVVADPSKESDVVDVPVPVAVVPDAWPVVVDRVEALGGTATLRDAERKDGPVVTDTGSLVVDCDFGAIETPEAVAASLSAVPGVVEHGLFVGMADAVYVGTDDGVRVRDP

SEQ ID NO: 3156 - DNA, 672 bp, Herminiimonas arsenicoxydans
  CDS (1)..(672): transl_table=11
atgacccaagatgaaatgaaacaagcagttgcccgcgctgcaatcgaatatgttgttccgggtgaaattattggggtcggtaccggctctactgccaattttttcatcgacgaactgggcaaaatcaaggatcgcatcaaaggcgcagtcgcttcatcggaagcgaccgcacaacgcctgaaatcgcatggcattgctgttttcgatctgaacgagatcgatgccatgtcggtatatatcgacggtgcggatgaaatcactgcgcaaggggcaatgatcaagggcggcggcgcggcactgacgcgtgaaaaaatcgttgcttctgtcgccaaacaatttgtttgcattgccgatggctcgaaactggtggatctgctgggcaatttccccttgccggtggaagtgattccgatggcgcaagcggtggtggcgcgcaagctggcggcactgggcggcgaaccgcgtctgcgattgaaggatggcaagccgctggtgaccgataatggctgcttcatcattgatgtgctgggcttgaagattcaagatcctgccgaactggaagcgcagatcaacaatatcgtcggggtggtaacggtcggcctgtttgcacggcgcggcgccgatattgccttgctcggcacggcagaaggcgtcaagcgtctgacgttctag

SEQ ID NO: 3157 - protein, 223 aa, Herminiimonas arsenicoxydans
MTQDEMKQAVARAAIEYVVPGEIIGVGTGSTANFFIDELGKIKDRIKGAVASSEATAQRLKSHGIAVFDLNEIDAMSVYIDGADEITAQGAMIKGGGAALTREKIVASVAKQFVCIADGSKLVDLLGNFPLPVEVIPMAQAVVARKLAALGGEPRLRLKDGKPLVTDNGCFIIDVLGLKIQDPAELEAQINNIVGVVTVGLFARRGADIALLGTAEGVKRLTF

SEQ ID NO: 3158 - DNA, 672 bp, Idiomarina loihiensis
  CDS (1)..(672): transl_table=11
atgtcaggcaacgctgatgcactcaaaaaagcggcagcagaagctgctatgcaatacattgaagacggcactgtggtcggagtcggcaccggctcaacggtaaacttttttatcgatgccctggccgaacgaaagcatgacatagagggtgcggtatccagctctgaagcctcaaccgagcgcctgaaatcgcacggcattgaagtgtttgagcttaactcggttgtggaggtacccatttacgtagacggggctgacgaaattactgagcacggtcaaatggttaaaggcggcggtggcgcattaacgcgcgagaaaattattgccgcagtagccaggaagtttgtttgcgttgcagatgaaagcaaaatggttggccgcctgggtcaattcccggtgccggttgaagttattcccatggcgcgttcgtacgtggcccgagaaattgtgaagctgggcggagacccggtgtggcgtcagggttttactaccgacaacggcaactggatcctcgatgtgcataacttcgatattatggagccaatgaaacttgaagctgagctgaataatattgtcggcgtggtcactaacgggctgtttgcccagcgcggcgctgatatcgctttaattgctcgtgaagacggagtacaaaccctgaaggtaagtggctaa

SEQ ID NO: 3159 - protein, 223 aa, Idiomarina loihiensis
MSGNADALKKAAAEAAMQYIEDGTVVGVGTGSTVNFFIDALAERKHDIEGAVSSSEASTERLKSHGIEVFELNSVVEVPIYVDGADEITEHGQMVKGGGGALTREKIIAAVARKFVCVADESKMVGRLGQFPVPVEVIPMARSYVAREIVKLGGDPVWRQGFTTDNGNWILDVHNFDIMEPMKLEAELNNIVGVVTNGLFAQRGADIALIAREDGVQTLKVSG

SEQ ID NO: 3160 - DNA, 660 bp, Klebsiella pneumoniae subsp
  CDS (1)..(660): transl_table=11
atgacgcaggatgaactgaaaaaagcggtaggttgggcagcactgcaatatgtacagccagggactattgtcggcgtaggcaccggctcgacggcggcccattttattgacgcgctgggcaccatgaaggggcagatcgaaggggcggtttccagctccgacgcctccaccgagaagctgaaaagcctcgggatcaccgtcttcgatcttaacagcgtcgatcgcctggggatctatgttgacggcgcggatgagatcaacggccatatgcagatgatcaaaggcggcggcgcggcgctgacccgtgaaaagatcatcgcctcggtcgcggataaatttatctgcatcgccgacgcctccaagcaggtcgatattctgggcaagttcccgctgccggtggaagtcattccgatggcgcgcagcgccgtggcgcgtcagctggtcaagctgggcggccgtccagagtaccgtcagggcgtggtgaccgataacggcaacgtgatccttgacgtgcacggcctggaaattctcgatgcgatcgcgctggaaaacgcgatcaacggtattcctggcgtcgtcaccgtggggctgttcgccaaccgtggcgccgacgtggcgctgattggcactgccgacggcgtgaagaccatcgtaaaatag

SEQ ID NO: 3161 - protein, 219 aa, Klebsiella pneumoniae subsp
MTQDELKKAVGWAALQYVQPGTIVGVGTGSTAAHFIDALGTMKGQIEGAVSSSDASTEKLKSLGITVFDLNSVDRLGIYVDGADEINGHMQMIKGGGAALTREKIIASVADKFICIADASKQVDILGKFPLPVEVIPMARSAVARQLVKLGGRPEYRQGVVTDNGNVILDVHGLEILDAIALENAINGIPGVVTVGLFANRGADVALIGTADGVKTIVK

SEQ ID NO: 3162 - DNA, 825 bp, Kluyveromyces lactis
  CDS (1)..(825)
atgtaccgtgtgtttgataaactagcttctaggccgtttgtttcactccccggaatccagctcatcgccaaaatgccattatccgatcttaataaactgcctccattagctgaccagttggaacaagctaagagaattgcagcctaccgtgctgttgacgaaaacttcgacgcaaagacccataaggttgtcggtgttggcagtggtactactgttgtttatgttgctgaaagacttggggaatacatggatgagaaaacaaattttgtttgtattccaacgggcttccaatcgaagcaattgatcctatcaaacaagttacaacttggtgtcattgaacaattcccagaagttgacattgcctttgacggtgccgatgaagttgatgcaggtttgcaattaattaagggtggtggtgcttgcttgttccaagagaagttagttagtactagtgccaaaaaattcatcgttgtggcggattcaaggaagaaatctccaaagtacttgggtaccaactggaaaaaaggtgttccaattgaggttgttccaagctcgtacgttcgtgtcctctctgatttaaagaacaaattgaactgcaaatctgccatggtaagacaaggtgggtcagctaaagccggccctgttgtcaccgataactgcaatttcatcatcgatgctgatttcggagaaattacagacccaagaaagctacatcaagatatcaaactattagttggtgttgtcgaaactggtttgttcattgataatgccgaaaaggcttactttggctatccagatggttctgtagacctacaagagttataa

SEQ ID NO: 3163 - protein, 274 aa, Kluyveromyces lactis
MYRVFDKLASRPFVSLPGIQLIAKMPLSDLNKLPPLADQLEQAKRIAAYRAVDENFDAKTHKVVGVGSGTTVVYVAERLGEYMDEKTNFVCIPTGFQSKQLILSNKLQLGVIEQFPEVDIAFDGADEVDAGLQLIKGGGACLFQEKLVSTSAKKFIVVADSRKKSPKYLGTNWKKGVPIEVVPSSYVRVLSDLKNKLNCKSAMVRQGGSAKAGPVVTDNCNFIIDADFGEITDPRKLHQDIKLLVGVVETGLFIDNAEKAYFGYPDGSVDLQEL

SEQ ID NO: 3164 - DNA, 693 bp, Lactobacillus acidophilus
  CDS (1)..(693): transl_table=11
atggataaaaaagaacaagatcgtttgaaaaaagaagctgctgaaaaagcagcaaatatggttcaatccggcatgatcttaggtgtaggtaccggatctactgtagcctttttcattgatgctttaggtaagcgcaaagatgaagaagatttgaagttgaaggcgatcgtgaccaccagtaatagaagtaagaagcaacttgagagtttaggctttgaagttagcgaacttgctgatattgatcaagctgatttgactgtcgatggatcagatcgtgttgctgataacttagacggaattaaaggcggtggcggtgccttaactcttgaaaagaacgttgccattaactcaaagaagatcgtttggatcgttgatgaatctaagttggttcaccgtttgagcggattccctcttcctgttgaagtattaccaatctcttgtgagcaaaacttcagacgctttgaacaagagggcttgaagccacaatggcgtacggatggtgacaagcgttacatcactcactatggcaactacatcattgatttagcagttgatccaattcctgcccctcatggtttagcagactaccttgatcatactgttggtgtagttgaacatggtttgttccttgatatgtgtgatgaagtaattattgctcatagcgatggtacgattgaagataagattaaataa

SEQ ID NO: 3165 - protein, 230 aa, Lactobacillus acidophilus
MDKKEQDRLKKEAAEKAANMVQSGMILGVGTGSTVAFFIDALGKRKDEEDLKLKAIVTTSNRSKKQLESLGFEVSELADIDQADLTVDGSDRVADNLDGIKGGGGALTLEKNVAINSKKIVWIVDESKLVHRLSGFPLPVEVLPISCEQNFRRFEQEGLKPQWRTDGDKRYITHYGNYIIDLAVDPIPAPHGLADYLDHTVGVVEHGLFLDMCDEVIIAHSDGTIEDKIK

SEQ ID NO: 3166 - DNA, 699 bp, Lactobacillus johnsonii
  CDS (1)..(699): transl_table=11
atgaataagacagagcaagatcaattaaaaaaagaagcagctactaaagcagctaagatggtagagcctaattctgttttaggagttggaacaggctcaacagttgcgttttttatcgatgcattaggtgaacgcaaagaaagagaaggttttagtttaaagcatattgttactacttctaaccgtagtaagaagcaacttgaaggactaggctttaaggttgatgagttagcagatattgatcaagctgatttaacagtagatggcgctgatcgagtagacgataatttagatggaattaaaggcggcggtggtgccttaactttagaaaaaaatgttgccatcaactcgaagaagattatttggattgttgatgaatcaaaactggttcaccatctcagcggtttcccgcttccagttgaagtattaccagtatctgctgaacaaaactttaaacgttttgaagcagaaggtttgaagcctcaatggcgtttaaatgatgagggcaagcgttatgtgacgcattatggtaattacataattgatttagctgctgatccaactcccgtaccacacggtttagctgattatttggaccacactgttggtgtagttgagcacggtttgtttttagacatgtgtgatgaagtcatcattgcacatagtgatggtacaattgaagataagaagagaaaataa

SEQ ID NO: 3167 - protein, 232 aa, Lactobacillus johnsonii
MNKTEQDQLKKEAATKAAKMVEPNSVLGVGTGSTVAFFIDALGERKEREGFSLKHIVTTSNRSKKQLEGLGFKVDELADIDQADLTVDGADRVDDNLDGIKGGGGALTLEKNVAINSKKIIWIVDESKLVHHLSGFPLPVEVLPVSAEQNFKRFEAEGLKPQWRLNDEGKRYVTHYGNYIIDLAADPTPVPHGLADYLDHTVGVVEHGLFLDMCDEVIIAHSDGTIEDKKRK

SEQ ID NO: 3168 - DNA, 675 bp, Lactococcus lactis subsp
  CDS (1)..(675): transl_table=11
atggataatttaaaaaaacaagtcggcataaaagctgctgaatttgttaaatcgggaatggtcgttggtttaggaactgggtcaacagcagcctattttgtcgaagaattgggtcgaagaattgccgaagaacaattggaaattacgggtgtaacaacgtccaatgtaacaagtagccaagccagagctcttggaattcctttagcctctattgacgaagtagattatgttgatttaacagttgatggcgcagatgaaattgattcttcactaaatggtattaaaggtggtggagcagcacttctaatggaaaaaattgttgcaacctactcaaaagactatatttggattgttgatgaaagtaaattatcagaaaatctaggatcctttaaaattcctgtagaagttattccttatggctcacaacaagtttttaaaaaattcgaagcggctggctatgctccaacttggcgtctaaatgaggaaaacgagagattgataacggatatgcatcactttattattgaccttcatatctctcaaattaaagaaccagaaaaacttgctgaagagcttgatttaatgggtggagttgttgaacacggcctctttaataacatggttaaaaaagtgattgttgctggcaacgaaggcgtaagaataataaataagtaa

SEQ ID NO: 3169 - protein, 224 aa, Lactococcus lactis subsp
MDNLKKQVGIKAAEFVKSGMVVGLGTGSTAAYFVEELGRRIAEEQLEITGVTTSNVTSSQARALGIPLASIDEVDYVDLTVDGADEIDSSLNGIKGGGAALLMEKIVATYSKDYIWIVDESKLSENLGSFKIPVEVIPYGSQQVFKKFEAAGYAPTWRLNEENERLITDMHHFIIDLHISQIKEPEKLAEELDLMGGVVEHGLFNNMVKKVIVAGNEGVRIINK

SEQ ID NO: 3170 - DNA, 684 bp, Lactobacillus plantarum
  CDS (1)..(684): transl_table=11
atgaatcaggatcagttaaaacaacttgttggtcaaaaagccgttgaatacattcaagacggcatgcaggtcggcctcggaaccggctcaaccgttaaattcatggttgatgctctgggtgaacgggtcaaaaatgaacatttaaacattgtcggcgtctcaacctccgaccgaaccgctgcccaagctaaggcgctcggtatcccgatgaaatccgttgacgaagtcgaccatctcgacttaacgatcgacggtgccgacgaaatcgccgatgatttccaaggcgttaagggtggtggcgccgccttactcttcgaaaaaatcgttgccatcaattctgataaagtcatgtggattgttgatgaaagcaaaatggtccatcaattaggtgcctttggcttacccgttgaagtgattccttacggcagccaacatgtctttgaaaaaatggctgcccggggctataacccagtattccgtaaagtcaacgatgaactcgtccggaccgattctaataatattatcatcgatttacacatcgacccaatcacggatccccacgctttagccgaagatttaattcacatggttggtgtggttgaacacggcctgttcttagacatggtcaacactgtcattgtcggtcatgccaatggtcccgaggttatcgaagcacgaccatag

SEQ ID NO: 3171 - protein, 227 aa, Lactobacillus plantarum
MNQDQLKQLVGQKAVEYIQDGMQVGLGTGSTVKFMVDALGERVKNEHLNIVGVSTSDRTAAQAKALGIPMKSVDEVDHLDLTIDGADEIADDFQGVKGGGAALLFEKIVAINSDKVMWIVDESKMVHQLGAFGLPVEVIPYGSQHVFEKMAARGYNPVFRKVNDELVRTDSNNIIIDLHIDPITDPHALAEDLIHMVGVVEHGLFLDMVNTVIVGHANGPEVIEARP

SEQ ID NO: 3172 - DNA, 651 bp, Legionella pneumophila subsp
  CDS (1)..(651): transl_table=11
gtgagtgaattaaaaatcaaagcagccaaagcagctatagcttatattgaagatgatatggttataggtgttggaacaggctctacagttaatttttttataaaagaactggcagcaatcaaacataagatagaggcttgtgtagccagttcaaaagcaaccgaggcattgcttcgggcagaaggtatccctgtaattgatttaaattcagtacaggatttacctatctatgttgatggcgctgatgaagtcaatgaacgcggtgaaatgataaaggggggcggaggagctctgactcgagagaaaattgtagcgaatgtagccacacaatttatttgtattgtcgatgaatccaaggttgtaaaacgtttaggggaatttcccgttgctgtggaagtcattccaatggcccgtagttttgttgcacgacaaattgttaaattagggggagaccctgaatacagagaaggtttcgttactgataatggtaatattattctggatgtgtttaatctgagtttctcaacacctatggccttggaagacagtcttaatgtaatcccgggtgtcgttgaaaatggagtgtttgccaaacgtttggcagataaagtgttagtggcttcagcaagtggtgtgaataatttaaaatag

SEQ ID NO: 3173 - protein, 216 aa, Legionella pneumophila subsp
MSELKIKAAKAAIAYIEDDMVIGVGTGSTVNFFIKELAAIKHKIEACVASSKATEALLRAEGIPVIDLNSVQDLPIYVDGADEVNERGEMIKGGGGALTREKIVANVATQFICIVDESKVVKRLGEFPVAVEVIPMARSFVARQIVKLGGDPEYREGFVTDNGNIILDVFNLSFSTPMALEDSLNVIPGVVENGVFAKRLADKVLVASASGVNNLK

SEQ ID NO: 3174 - DNA, 675 bp, Listeria innocua
  CDS (1)..(675): transl_table=11
atgattaatcaaaagaaaatcgcaggtgaaaaagcgtgtgaatggattgaagatggaatggttgtcggtcttggaacgggaagtaccgtttattatacgattgaaaaattaggggaaatggtgcaaaaaggcttaaacattactggggtgtctacttctatagaaacagaacaacaagctcggacattagggattccgctaaaatctttaaatgatgtaacgaaaattgatgtcacaattgatggcgctgatgaaattaatcaagcttttcaaggaataaaagggggcggaggagcacttttacgagaaaagatggttgctcaagctagttcaaagaatatttgggttgttggggaagagaagcttgtgacagagcttggaaaatttcctttgccacttgaagtgattccttttggatggaagcaaattaaacgaatgctagaaaatgacggggttgaaactactttacgcaaacagtcgtcaggagaaatatatgaaacaaataacggcaattatattttagatattataaatcagacctttactaatccagaagcctggcatgaaaagttagcgggcattcctggggtacttgagcacggcttatttcttcattatgtagatataattatttgcggcaaagcatcaggagaaatagagataataaaaaaatag

SEQ ID NO: 3175 - protein, 224 aa, Listeria innocua
MINQKKIAGEKACEWIEDGMVVGLGTGSTVYYTIEKLGEMVQKGLNITGVSTSIETEQQARTLGIPLKSLNDVTKIDVTIDGADEINQAFQGIKGGGGALLREKMVAQASSKNIWVVGEEKLVTELGKFPLPLEVIPFGWKQIKRMLENDGVETTLRKQSSGEIYETNNGNYILDIINQTFTNPEAWHEKLAGIPGVLEHGLFLHYVDIIICGKASGEIEIIKK

SEQ ID NO: 3176 - DNA, 675 bp, Listeria monocytogenes serotype 4b
  CDS (1)..(675): transl_table=11
atgattaatcaaaagaagatagcaggagaaaaggcttgtgagtggattaaagatggaatggttgtgggccttggaacgggcagtacagtctattacacgattgaaaagcttggagaaatggtaaataatggtttgcatattacaggggtggcaacttctgaagaaacaagcaaacaagcacaaaatttaggaatacctttgaaatcgctaaatgacgtagcggaaatagatattactattgatggtgctgatgaaattgatacggattttcaaggaataaaaggtggaggaggagcactattacgtgaaaaaatggtagcaagtgcgagtttgaaaaacatttgggttgtcagtgaggagaagcttgtaagaaacttagggaagtttcctttgcctatagaagtaataccttttggttggaagcaaattgagagaacacttgaaaaagagcatattcaaacaattttacggagacaatcttcaggagaaatctatgtgacaaataacgggaactatattttggatatagtaaatcaaacttttagggatgcagaaatgtggcaagaaaaattagcgcaaattccagggattgtggagcatggattatttcttcattatgtggatataattgtttgtgcgaaggcaaatggcgaaatagagctaataaaaaaatag

SEQ ID NO: 3177 - protein, 224 aa, Listeria monocytogenes serotype 4b
MINQKKIAGEKACEWIKDGMVVGLGTGSTVYYTIEKLGEMVNNGLHITGVATSEETSKQAQNLGIPLKSLNDVAEIDITIDGADEIDTDFQGIKGGGGALLREKMVASASLKNIWVVSEEKLVRNLGKFPLPIEVIPFGWKQIERTLEKEHIQTILRRQSSGEIYVTNNGNYILDIVNQTFRDAEMWQEKLAQIPGIVEHGLFLHYVDIIVCAKANGEIELIKK

SEQ ID NO: 3178 - DNA, 675 bp, Listeria monocytogenes
  CDS (1)..(675): transl_table=11
atgattaatcaaaagaagattgcaggagaaaaggcttgtgaatggattaaagatggaatggttgtgggtcttggaacgggcagtacagtttattacacgattgaaaagcttggagaaatggtaaataacggtttgcacattacaggggtagcgacttctgaagaaacaaacaaacaagcacaaaatttaggaatacctttgaaatcgctaaatgacgttacggaaatagatattactattgatggtgcagatgaaattgatacggattttcaaggaataaagggtggaggaggagcactgttacgcgaaaaaatggtagcaagtgcgagtttgaaaaacatttgggttgtcagtgaggagaagcttgtaagaaacttagggaagtttcctttacctttagaagtaataccttttggttggaagcaggttgagagaaaacttgaaaaagagcatattcaaacaaatttacggaaacaatcttcaggagaagtctatgtgacaaataacgggaactatattttggatatagtaaatcaaacttttacggatgcagaaatgtggcaagaaaaattagcgcaaatcccagggattgtggagcatggattatttcttcattatgtggatataattatttgtgcgaaggcgaatggcgaaattgaactaataaaaaaatag

SEQ ID NO: 3179 - protein, 224 aa, Listeria monocytogenes
MINQKKIAGEKACEWIKDGMVVGLGTGSTVYYTIEKLGEMVNNGLHITGVATSEETNKQAQNLGIPLKSLNDVTEIDITIDGADEIDTDFQGIKGGGGALLREKMVASASLKNIWVVSEEKLVRNLGKFPLPLEVIPFGWKQVERKLEKEHIQTNLRKQSSGEVYVTNNGNYILDIVNQTFTDAEMWQEKLAQIPGIVEHGLFLHYVDIIICAKANGEIELIKK

SEQ ID NO: 3180 - DNA, 660 bp, Mannheimia succiniciproducens
  CDS (1)..(660): transl_table=11
atgaatcaactcgaaatgaaaaaagttgcggctaaagccgcattacaatttgtcaaaccggatatgattgtcggggtagggagcggttcaacggtaaattgctttattgaagaattaggtgcatttcgtgatcaaattaaaggcgcggtagcggcttctaaagcatcggaagaattattaagaaaacaaggtattgaggttttcagtgccaatgacgtatcgagtctggatatttatgtagacggcgccgatgaaatcaatccgcagaaaatgatgattaaaggcggcggtgcggcgttaacccgtgaaaaaatcgtttcgtctttggcgaaaaattttatttgcattgtcgatagcagcaaacaggtagatatactgggttccactttcccgttgccggtagaagtgattcctatggcgcgttcacaagtcgcccgtaaattggtagcgttgggcggaagccctgaatggcgtgaaggcgtgattaccgataacggtaacgtaattttggacgtgcataattttattattatgaatcctattgaaatggaaaaagaattgaataatgtcgcaggtgtggtaacaaacggtatttttgcgttaaatgcggcgcataccgtgattgtcggcacaccggacggtgctaaaattattgaataa

SEQ ID NO: 3181 - protein, 219 aa, Mannheimia succiniciproducens
MNQLEMKKVAAKAALQFVKPDMIVGVGSGSTVNCFIEELGAFRDQIKGAVAASKASEELLRKQGIEVFSANDVSSLDIYVDGADEINPQKMMIKGGGAALTREKIVSSLAKNFICIVDSSKQVDILGSTFPLPVEVIPMARSQVARKLVALGGSPEWREGVITDNGNVILDVHNFIIMNPIEMEKELNNVAGVVTNGIFALNAAHTVIVGTPDGAKIIE

SEQ ID NO: 3182 - DNA, 705 bp, Methanosarcina acetivorans
  CDS (1)..(705): transl_table=11
atgacggaaagaaatacttctactgattctccagaaaaaagggcggcaggaattgctgcagcagggcttgtcagctccgggatgcttgtaggactcgggacaggttcaaccgttgcatacacaataaaagaacttgggcgcagggtgagggaggaggggctcgatatcctgggagtcgttacctcttatcagtccgagatgcttgcaatagaggccggaatcaggctgacgacccttgcccagcatccggaactggaccttgccattgacggggctgaccagatagattccgaactccgtgcgattaagggaggaggagcggctcatacaagggaaaagatcgtttccgtttctgcaagacggtttgtggttgtagccgacgagtcgaaaacgagcaagcagcttgataaactcgtacctgtggaagtcctgccttttgcaaaagaacctgtggtaaaaaagatccgggaactgggcggaaaaccccagctcaggtctgccgtaaaaaaagacgggcccgtaataaccgacaatggaaattttgtccttgatgtcgaatttggagttataaaagaccctgaagcgctcgcccttcaactatcttcaatccctggtgtcgttgagcatgggattttttgcaatgtgagcgagctttacatagggaataaagacggggctataaagattataacccgacagaaataa

SEQ ID NO: 3183 - protein, 234 aa, Methanosarcina acetivorans
MTERNTSTDSPEKRAAGIAAAGLVSSGMLVGLGTGSTVAYTIKELGRRVREEGLDILGVVTSYQSEMLAIEAGIRLTTLAQHPELDLAIDGADQIDSELRAIKGGGAAHTREKIVSVSARRFVVVADESKTSKQLDKLVPVEVLPFAKEPVVKKIRELGGKPQLRSAVKKDGPVITDNGNFVLDVEFGVIKDPEALALQLSSIPGVVEHGIFCNVSELYIGNKDGAIKIITRQK

SEQ ID NO: 3184 - DNA, 657 bp, Methylococcus capsulatus
  CDS (1)..(657): transl_table=11
atgactcaagacgaactcaaacggaaagtcgccgaagcggcattggattatgtcaaggacgtcaccatcctgggggtgggaaccggctcgaccgtgaaccattttattgatttactggccgatctcaaaggcgggatcgaaggtgcggtgtccagctcccaggccagctccgagcgtctgaagaagatcggcatcccggtgctcgacctcaacgccgccggcaccctggatgtctacgtggacggcgccgatgaagtcaatgccgccaagcagatgatcaagggcggcggcgcggccctgacccgcgagaagatcgtggcggaggccagccgcaagttcgtctgcatcgtcgatgagaccaagtgcgtcgacgtgctgggcaagttcccgctgccggtcgaggtgatcccgatggcgcgcagcctggtcgcccgccgcctggtggaactggggggcacgccggtgtggcgggagaactgcatcaccgacaatggcaatgtgattctcgacgtgcacaacctcaccatcaccgatccggtcgagctggaacgccgaatcaacgatatccccggggtggtctgcaacggcgtgttcgcactgcggccggcggacgtcgtgctgatcggatcgcccagcggcgtgcgcacgctcccttga

SEQ ID NO: 3185 - protein, 218 aa, Methylococcus capsulatus
MTQDELKRKVAEAALDYVKDVTILGVGTGSTVNHFIDLLADLKGGIEGAVSSSQASSERLKKIGIPVLDLNAAGTLDVYVDGADEVNAAKQMIKGGGAALTREKIVAEASRKFVCIVDETKCVDVLGKFPLPVEVIPMARSLVARRLVELGGTPVWRENCITDNGNVILDVHNLTITDPVELERRINDIPGVVCNGVFALRPADVVLIGSPSGVRTLP

SEQ ID NO: 3186 - DNA, 681 bp, Methanocaldococcus jannaschii
  CDS (1)..(681): transl_table=11
gtgtcaaatgaagatttaaaattaaaagtagctaaggaagcagtgaagttagttaaagatggaatggttattggattaggaaccggttcaacagcagctttattcatcagagaacttggaaatagaattagagaagaggagctaacagtcttcggaattccaacatcatttgaagctaaaatgctggctatgcagtatgaaattccattagttacattagatgagtacgatgttgatattgcctttgatggagctgatgaagttgaggaaacaactctctttttaataaaaggaggtggaggctgccatactcaagaaaaaatagttgattacaacgcaaatgaatttgttgttttagttgatgaaagtaaattagttaaaaaattaggggaaaagttcccaatccctgtggaagttattccttcagcttatagggttgtaataagagctttatcagaaatgggaggagaggcagtaattagattaggagacagaaaaagaggacctgttataacagacaacggaaatatgattattgatgtatttatgaacatagatgacgctatagaacttgagaaagaaattaataacattcctggagtagttgaaaatggtatctttacaaaggtagataaggttttagttggaactaaaaaaggagtaaaaacacttaaaaaataa

SEQ ID NO: 3187 - protein, 226 aa, Methanocaldococcus jannaschii
MSNEDLKLKVAKEAVKLVKDGMVIGLGTGSTAALFIRELGNRIREEELTVFGIPTSFEAKMLAMQYEIPLVTLDEYDVDIAFDGADEVEETTLFLIKGGGGCHTQEKIVDYNANEFVVLVDESKLVKKLGEKFPIPVEVIPSAYRVVIRALSEMGGEAVIRLGDRKRGPVITDNGNMIIDVFMNIDDAIELEKEINNIPGVVENGIFTKVDKVLVGTKKGVKTLKK

SEQ ID NO: 3188 - DNA, 705 bp, Methanosarcina mazei
  CDS (1)..(705): transl_table=11
atgacggaaagaaatacttctactgattctccggaaaaacgggcggcaggaattgctgcggcagggcttgtcagctcagggatggttgtagggctcggtacgggttcgacagttgcatatactataaaagagctggggcgcagggtaaaggaggaaggcctcgacatcctcggggttgttacctcctaccagtccgaaatgctggcaatagatgccgggataaggcttaccaccctttctcaggaccctgaactggatattgcaattgacggagctgaccagatagactccaacctttataccatcaaaggaggcggggctgctcatacaagggaaaagatcgtttccgtgtctgcaaaaaggtttgtagtagtagccgacgactctaaaaccagtacgcagcttgataagcctgtgcctgttgaagtccttccctttgcaaaagaacctgcagtgaacaggatccggaaacttgggggagaacccagactcaggtctgccgtaaaaaaagacggtcccgttataacggataatggaaactttgttcttgatgtcgaatttggcgttataaaagatcctgaggctcttgcccttcaattgtctgcggttccgggagttgttgaacacggaatttttagtaatgttgatgaactttacatagggaaaaaagacgggtccgtaaaaattatatccagacagaagtga

SEQ ID NO: 3189 - protein, 234 aa, Methanosarcina mazei
MTERNTSTDSPEKRAAGIAAAGLVSSGMVVGLGTGSTVAYTIKELGRRVKEEGLDILGVVTSYQSEMLAIDAGIRLTTLSQDPELDIAIDGADQIDSNLYTIKGGGAAHTREKIVSVSAKRFVVVADDSKTSTQLDKPVPVEVLPFAKEPAVNRIRKLGGEPRLRSAVKKDGPVITDNGNFVLDVEFGVIKDPEALALQLSAVPGVVEHGIFSNVDELYIGKKDGSVKIISRQK

SEQ ID NO: 3190 - DNA, 720 bp, Methanococcus maripaludis
  CDS (1)..(720): transl_table=11
atggctaggactaaaaaagctaatgacgaagtagccacagattccgattctttgaagttaaaagttgcaaaacaggctgcaaaacttgtaaaagatgaaatggttgtgggacttggttcgggttcaactgcaaatcttttcattcaggaacttggaaaaagggttgttgaagaagaattatatatttacggggtacctacatcttttgattcaagaatgatggcaagtaattctggaattccgttaatttctcttgaccagtgtggggaaattgacattgcaatagatggtgcagatgaagtctgtaaaaagactctttcacttataaaaggtggcggtggatgccacacaatggaaaaaattgtagattaccatgcaaaagagttcgttgtattggctgatgaaggaaaattagttgagtcattaggggacaaaacagcggtacctttagaagtaattccttttgcatattctacagttttaaacaaacttttggatatgaacactgcacctgcaattaggtcaggttctggaaaaatgggtccagtaattacagataatggaaacatgattattgatgtatttatcaatattgaggacgcagaagaaactgaaaccatgttaaacaatattcctggtgttttagagaatggaatatttagtaaatgtgataaagtgcttgttggaacttctaaaaaagtagaaatactcaaaaaataa

SEQ ID NO: 3191 - protein, 239 aa, Methanococcus maripaludis
MARTKKANDEVATDSDSLKLKVAKQAAKLVKDEMVVGLGSGSTANLFIQELGKRVVEEELYIYGVPTSFDSRMMASNSGIPLISLDQCGEIDIAIDGADEVCKKTLSLIKGGGGCHTMEKIVDYHAKEFVVLADEGKLVESLGDKTAVPLEVIPFAYSTVLNKLLDMNTAPAIRSGSGKMGPVITDNGNMIIDVFINIEDAEETETMLNNIPGVLENGIFSKCDKVLVGTSKKVEILKK

SEQ ID NO: 3192 - DNA, 681 bp, Methanobacterium thermoautotrophicum
  CDS (1)..(681): transl_table=11
atggaggtatttatgaatctcaagaagatggctgctttgagggcggttgacgaaatagatgatggggatgttgtaggtcttggaacaggttcaacaacccattacttcatagaggagcttggaagacgtgtcagggaggagggactggaggttatgggtgtacctacatcctaccagtcaatgttccttgcagcggagtcagggataaaggttacaagtctcgctgaacatgatgttgatgtggctgttgacggtgcagatgaggttgacccggacctcaaccttataaagggtggtggggccgcccacacccttgagaagatagttgactcatccgccgcgagtttcatagttattgtggacgaatcaaagcttgttgaaagactgggtgccttcccactacctgttgaagtcatacccgcagcttgcaggcctgtgaagctcaaactcgagtcaatgggggcttcagtgaatataaggtcctctgagggcaaggacggtcctgttgttactgataatggtaactttgtccttgacgcggcctttggtgttattgatgatcccggagccatggagtcccggctgaacaacataccgggtgttgttgagaacggcatattcgctggaattgcagatatggttatagcaggtacctctgagggtcttaagattctcaggtga

SEQ ID NO: 3193 - protein, 226 aa, Methanobacterium thermoautotrophicum
MEVFMNLKKMAALRAVDEIDDGDVVGLGTGSTTHYFIEELGRRVREEGLEVMGVPTSYQSMFLAAESGIKVTSLAEHDVDVAVDGADEVDPDLNLIKGGGAAHTLEKIVDSSAASFIVIVDESKLVERLGAFPLPVEVIPAACRPVKLKLESMGASVNIRSSEGKDGPVVTDNGNFVLDAAFGVIDDPGAMESRLNNIPGVVENGIFAGIADMVIAGTSEGLKILR

SEQ ID NO: 3194 - DNA, 672 bp, Neisseria gonorrhoeae
  CDS (1)..(672): transl_table=11
atgacgacacaagacgaactcaagcgcatcgccgccgaaaaagcagtcgaattcgtacccgaaaacgaatacatcggcatcggtaccggttcgaccatcaatttcttcatcgaagccttgggcaaaagcggtaaaaaaatcaaaggcgcggtttcaacctccaaaaaatccggcgaactgcttgcccggtacgacattcccgtcgtgtccctgaacgaagtgtccggtttggcggtctatatcgacggtgcggacgaagtgaaccacgccctgcaaatgattaagggcggcggcggcgcgcacctcaacgaaaaaatcgtcgccagcgcatcagaaaaattcgtctgcattgcggacgaaagcaaatatgtttcccggctgggcaaattcccactgcccgtggaagccgtcgaaagcgcgcgctcccttgtttcgcgcaaactgcttgccatgggcggacagcccgaactgcgtatcggctacaccacgttttacggcaaccaaatcgtcgatgtccacggcttgaatatcgatcagccgctgacgatggaagatgaaatcaacaaaatcaccggcgtactcgaaaacggcatattcgcccgcgatgccgccgatgtgttgattttggggacggaagagggtgcgaaagtcatctatccctgccaagggtaa

SEQ ID NO: 3195 - protein, 223 aa, Neisseria gonorrhoeae
MTTQDELKRIAAEKAVEFVPENEYIGIGTGSTINFFIEALGKSGKKIKGAVSTSKKSGELLARYDIPVVSLNEVSGLAVYIDGADEVNHALQMIKGGGGAHLNEKIVASASEKFVCIADESKYVSRLGKFPLPVEAVESARSLVSRKLLAMGGQPELRIGYTTFYGNQIVDVHGLNIDQPLTMEDEINKITGVLENGIFARDAADVLILGTEEGAKVIYPCQG

SEQ ID NO: 3196 - DNA, 672 bp, Neisseria meningitidis serogroup B
  CDS (1)..(672): transl_table=11
atgacgacacaagacgaactcaagcgcatcgccgccgaaaaagcagtcgaattcgtacccgaaaatgaatatatcggcatcggtaccggctcgaccatcaactttttcatcgaagccttgggtaagagcggcaaaaaaatcaaaggcgcggtatctacttccaaaaaatccggcgaactgcttgcccagtacgatattcccgtcgtttctttgaacgaagtatcggggttggcggtctatatcgacggtgcggatgaagtgaaccacgccctgcaaatgattaaaggcggtggcggcgcgcacctcaacgaaaaaatcgtcgccagcgcgtccgaaaaattcatctgcattgcggatgaaagcaaatatgtttcacgtttgggcaaattccctctgcctgtggaagtcgtcgaaagcgcgcgctctcttgtttcgcgcaaactgctcgctatgggcggacagcccgaactgcgtatcggctacaccacgttttacggcaaccaaatcgtcgatgtccacggcttgaatatcgatcagccgctgacgatggaagacgaaatcaacaaaatcaccggcgtgctcgaaaacggcatattcgcccgcgatgccgccgatgtgttgattttggggacggaagagggtgcgaaagtcatctatccctgccaagggtaa

SEQ ID NO: 3197 - protein, 223 aa, Neisseria meningitidis serogroup B
MTTQDELKRIAAEKAVEFVPENEYIGIGTGSTINFFIEALGKSGKKIKGAVSTSKKSGELLAQYDIPVVSLNEVSGLAVYIDGADEVNHALQMIKGGGGAHLNEKIVASASEKFICIADESKYVSRLGKFPLPVEVVESARSLVSRKLLAMGGQPELRIGYTTFYGNQIVDVHGLNIDQPLTMEDEINKITGVLENGIFARDAADVLILGTEEGAKVIYPCQG

SEQ ID NO: 3198 - DNA, 672 bp, Neisseria meningitidis serogroup C
  CDS (1)..(672): transl_table=11
atgacgacacaagacgaactcaagcgcatcgccgccgaaaaagcagtcgaattcgtacccgaaaacgaatacatcggcatcggtaccggctcgaccatcaactttttcatcgaagccttgggtaagagcggcaaaaaaatcaaaggcgcggtatctacttccaaaaaatccagtgaactgcttgcccaatatgatattcccgtcgtttccctgaacgaagtatcggggttggcggtctatattgacggtgcggatgaagtgaaccacgccctgcaaatgattaaaggcggcggcggcgcacacctcaacgaaaaaatcgtcgccagcgcatcagaaaaattcgtctgcattgcggacgaaagcaaatatgtttcacgtttgggcaaattccctctgcccgtggaagtcgtcgaaagcgcgcgttcccttgtttcgcgcaaactgctcgctatgggcggacagcctgaattgcgtatcggctacaccactttttacggcaaccaaatcgtcgatgtccacggcttgaatatcgacaaaccgctgatgatggaagacgaaatcaacaaaatcaccggcgtactcgaaaacggaatattcgcccgcgatgccgccgatgtgttgattttggggacggaagagggtgcgaaagtcatctatccctgccaagggtaa

SEQ ID NO: 3199 - protein, 223 aa, Neisseria meningitidis serogroup C
MTTQDELKRIAAEKAVEFVPENEYIGIGTGSTINFFIEALGKSGKKIKGAVSTSKKSSELLAQYDIPVVSLNEVSGLAVYIDGADEVNHALQMIKGGGGAHLNEKIVASASEKFVCIADESKYVSRLGKFPLPVEVVESARSLVSRKLLAMGGQPELRIGYTTFYGNQIVDVHGLNIDKPLMMEDEINKITGVLENGIFARDAADVLILGTEEGAKVIYPCQG

SEQ ID NO: 3200 - DNA, 660 bp, Nitrosomonas europaea
  CDS (1)..(660): transl_table=11
atgacacaagacgagcagaaacgggcagtggcacaagcagccctgcagtatgtgccgacaggtgaaatcatcggcatcggaacaggatcgaccgccaatctttttattgatgagctggctaagatcaaacacaggattgaaggcgccgtggcaagctccgaggttactgcaaaccgtctgaagcaacacggcatcgaggttctggatctcaattccgtcggcgaactcccggtgtatatcgatggtgcagatgaaatcacccggaatatgcacatgatcaaaggaggcggtggtgcgctgacacgtgaaaaaatcgtagcggctgttgcacgtaaattcatctgtattgctgaccagagcaagctggtcaaggtactgggaaaatttccactgccagtagaagtcatcccgatggcacgcagctatgtcgcccgggaaatcacattactgggtggacaaccggcctggcgtcagggatttactaccgacaacggcaatatcattctcgatgtccataacctgaatatcatgaatccggttgaactggaaactgccctcaaccagattgcaggggtggtgacgaacggtctgtttgccagacgagcggccaacgtgctgctgatgggtaccgaccagggagtggagaccattacagtatag

SEQ ID NO: 3201 - protein, 219 aa, Nitrosomonas europaea
MTQDEQKRAVAQAALQYVPTGEIIGIGTGSTANLFIDELAKIKHRIEGAVASSEVTANRLKQHGIEVLDLNSVGELPVYIDGADEITRNMHMIKGGGGALTREKIVAAVARKFICIADQSKLVKVLGKFPLPVEVIPMARSYVAREITLLGGQPAWRQGFTTDNGNIILDVHNLNIMNPVELETALNQIAGVVTNGLFARRAANVLLMGTDQGVETITV

SEQ ID NO: 3202 - DNA, 699 bp, Protochlamydia amoebophila
  CDS (1)..(699): transl_table=11
atgacacaaacaaacgattcgccatccattaaagcaaaaaaggcagctgcccttaaagctgtagaatttgttcaagatcaaatgattattggtttaggaacaggttccacaatagcctacttcattgaagctttgggtaagcgctgtcaagcaggcctaaaaataactgcaattgcctcttcagaacgatccatgcggcaggctcgattggttggcattcctattgtcgattcagacactattttagaattagatttaacaatcgatggagcggacgaaatagatcctctcaaacagatgattaaaggaggaggaggagctcttttacgagaaaaactcattgcctcagcaagtaaagaaatgatcgttgttatcgatgagactaaacttgtgaataaattaggaaaatttcccgtagctaccgagatttcaatatttacatttcgtcatatagtaaaaaaacttaaggatcacggttattgcggatcgttacgagttaatcaagatcagagtttgtatcgtacagataatggaaattatatttttgatatttgttttcctgaacctattgacaatcctatttttgaacataatcggcttaaaagttttgccggggttttagaaactggccttttttttaatttagcagggcgtgttatcattggataccaaaatggaatgactaaaattgttgcatga

SEQ ID NO: 3203 - protein, 232 aa, Protochlamydia amoebophila
MTQTNDSPSIKAKKAAALKAVEFVQDQMIIGLGTGSTIAYFIEALGKRCQAGLKITAIASSERSMRQARLVGIPIVDSDTILELDLTIDGADEIDPLKQMIKGGGGALLREKLIASASKEMIVVIDETKLVNKLGKFPVATEISIFTFRHIVKKLKDHGYCGSLRVNQDQSLYRTDNGNYIFDICFPEPIDNPIFEHNRLKSFAGVLETGLFFNLAGRVIIGYQNGMTKIVA

SEQ ID NO: 3204 - DNA, 660 bp, Pasteurella multocida
  CDS (1)..(660): transl_table=11
atggatcaacttgaaatgaaaaaaatggctgcggcagccgcactgcaatacgtgaaacccgattcaatcattggggtaggcagtggctcaacagtcaattgttttattgaagcgctagggagtatgcgagatcaaattaaaggggcggtggcggcctcaaaagcctcagaagccttattagcaaaacaagggattgaagtgtttagtgccaatgaggtttcaagccttgatatctatgtcgatggtgccgatgagattaacccacagaaaatgatgatcaaaggcggaggtgccgcactaacccgtgaaaaaattgtggcagcgttggcaaaaaaattcatttgtatcgttgatacaagcaaacaagttgatgtgctcggctcaactttcgccttaccagttgaggtgattccaatggcgcgctcccaagtggcgcgtaaattagtcgccttaggtggctcaccagaataccgcgaaggtgttgttacagataatggtaacgtgattttagatgtctatcattttgctattatgaatcctgttgaaatggaaaaagaattaaataatgtgccgggcgtggtcaccaatggcatttttgctctacgcgcagcagatattattattgtcggcacgcctgaaggtgccaaagtcattgaataa

SEQ ID NO: 3205 - protein, 219 aa, Pasteurella multocida
MDQLEMKKMAAAAALQYVKPDSIIGVGSGSTVNCFIEALGSMRDQIKGAVAASKASEALLAKQGIEVFSANEVSSLDIYVDGADEINPQKMMIKGGGAALTREKIVAALAKKFICIVDTSKQVDVLGSTFALPVEVIPMARSQVARKLVALGGSPEYREGVVTDNGNVILDVYHFAIMNPVEMEKELNNVPGVVTNGIFALRAADIIIVGTPEGAKVIE

SEQ ID NO: 3206 - DNA, 687 bp, Pediococcus pentosaceus
  CDS (1)..(687): transl_table=11
atggatcaaaacgaattaaaaaaactagttggcgaagaagccgttaaatttattgaagatgggatgactgtgggtttaggtaccggttctactgttaaatttatggtggacgctcttggtgaacgcgttaaaaatgaaaatttaaatatcgttggggtcccaacttccgatcgtacagctgaacaagcccgttcattgggcattaatgttaaatctgttgacgaggttgatcatattgatttaaccattgatggagctgatgaaatcagttctgacttccaaggtatcaaaggtggcggtgccgctcacttgtttgaaaaaattgttgccacaaactcaaaaaaagtaatgtggattgtagatgaatctaaaatggttgatcacttaggggccttcccactccctctagaagtaattccatatggtagcaaacaagtcttcaagaagcttgaaaaagaaggccttcatcctgaatttaggaaaaatgatgctggcgaatatgttttaaccgattctaaaaactacgtaattgatcttcatcttggtgaaattaaacacccgcatcaattagcagattatctaatcaaacaagttggtattgtagaacaaggattgttccttgacatggttaatactgtcattgttggacgccaaaatggtccagaagttttgactgctcgaccataa

SEQ ID NO: 3207 - protein, 228 aa, Pediococcus pentosaceus
MDQNELKKLVGEEAVKFIEDGMTVGLGTGSTVKFMVDALGERVKNENLNIVGVPTSDRTAEQARSLGINVKSVDEVDHIDLTIDGADEISSDFQGIKGGGAAHLFEKIVATNSKKVMWIVDESKMVDHLGAFPLPLEVIPYGSKQVFKKLEKEGLHPEFRKNDAGEYVLTDSKNYVIDLHLGEIKHPHQLADYLIKQVGIVEQGLFLDMVNTVIVGRQNGPEVLTARP

SEQ ID NO: 3208 - DNA, 660 bp, Photorhabdus luminescens subsp
  CDS (1)..(660): transl_table=11
atgactcaggacgaactaaaaaaagcagtaggttgggcagcactcgaatttgttacaccaggaacagttgtgggtgtggggacaggctcaacggcttcacactttattgatgccctcggttccattaaagatcagattgaaggggcagtatccagctctgaggcttctactgagaagttaaaaagtttggggattcctgtattcgattgtaatgaagtcgattcccttgatatctacgttgatggcgcggatgaaatcaatggcaatatgcagatgattaaaggcggtggtgctgcattgacgcgtgaaaaaatcattgctgcaatagcaaaaaaattcgtttgtattgttgatgcttctaaaaaagttgaggtattgggtaaattccctctgccggttgaggtgattccaatggctcgggcttatgttgctcgtgagttggttaaattggggggagtaccaaaatatcgtcagaatgttgtgactgataacggcaatgtgattcttgatgtgcataatctagccatactcgatcctgctgagttagagaataaaattaatcgtatctcaggtgtggtgactgtgggcctatttgctaaccgtggtgcggatattgtattgatgggaacacttgatggagtggaaaccatcactcaataa

SEQ ID NO: 3209 - protein, 219 aa, Photorhabdus luminescens subsp
MTQDELKKAVGWAALEFVTPGTVVGVGTGSTASHFIDALGSIKDQIEGAVSSSEASTEKLKSLGIPVFDCNEVDSLDIYVDGADEINGNMQMIKGGGAALTREKIIAAIAKKFVCIVDASKKVEVLGKFPLPVEVIPMARAYVARELVKLGGVPKYRQNVVTDNGNVILDVHNLAILDPAELENKINRISGVVTVGLFANRGADIVLMGTLDGVETITQ

SEQ ID NO: 3210 - DNA, 660 bp, Photobacterium profundum
  CDS (1)..(660): transl_table=11
atgacacaagatgaaatgaagaaagctgctggctgggctgcactggaatacgtgactaaaggtagcattgtgggtgtgggtacaggctcaactgtcaatcacttcatcgatgcactagaaacacgtaaagaagaaattaaaggtgctgtttcaagttctgttgcttctactgaacgtctagaaaaactgggcattcctgtatttgaagcaaacgaagtcgctgggttagatatctatgtcgatggcgctgatgaaatcaacgctgaatacgacatgatcaaaggtggcggtgccgctttaacgcgtgaaaaaatcgtagccgctatttctgataagttcatttgtattgttgatgacaccaaacaagttgatgttttaggtcagttcccattaccggttgaagtcatcccaatggcacgttctttcatcggtcgcgaacttgttaagcttggcggtgatcctgaataccgtgaaggtgtggttactgataacggtaatatcatcattgatgtgcacaacatggctatcactgatgcaaaagacatggaaaagaaaatcaatgccctacctggcgttgtgactgtgggtctatttgctgcccgtggcgctgatgttctattggtcggtgcacctgaaggcgtaagaaaattcgagaaataa

SEQ ID NO: 3211 - protein, 219 aa, Photobacterium profundum
MTQDEMKKAAGWAALEYVTKGSIVGVGTGSTVNHFIDALETRKEEIKGAVSSSVASTERLEKLGIPVFEANEVAGLDIYVDGADEINAEYDMIKGGGAALTREKIVAAISDKFICIVDDTKQVDVLGQFPLPVEVIPMARSFIGRELVKLGGDPEYREGVVTDNGNIIIDVHNMAITDAKDMEKKINALPGVVTVGLFAARGADVLLVGAPEGVRKFEK

SEQ ID NO: 3212 - DNA, 744 bp, Pichia guilliermondii
  CDS (1)..(744): transl_table=12
atgctccccacatttgtccgcttctcccgcatcatgagttccggaattgagcatgctaaacgtatggctgcgtataaagcagtggacgccaactttcctccccatgccaaggttgtaggaattggctcgggatccactgtggtttatgttgctgagcgaattggccagttgaaaaataagcatgattttgtatgtatttccactggatttcaatcaaaacaactcattatagataatgggttgactttgggggccattgagcagtttcccaaggtggacattgcctttgatggcgccgacgaagtggacacaaacctcaatctcattaagggaggtggcgcctgtttatttcaagaaaagttagttgcaagttcggctgacaaattcattgtggttgcagacaccagaaaaaagtcacccagcgatttggggattgcgtggcgtaagggggtaccaattgaagtggtgcccaattcgtatgctgtggtgaccagacaactcaaggaattgggtgcaaaatccgtggtgctccgccaaggaggaggagccaaagcgggaccggtggttactgacaacaataattttcttatagatgctgattttggctcgatttctgaccctggaagcctccaccagcaaatcaagcttttggtgggggttgtggaaacggggttatttgtggatatggctcatacggcgtactttggggatgagagcggcgaggtgagcgagcagctgaggtaa

SEQ ID NO: 3213 - protein, 247 aa, Pichia guilliermondii
MLPTFVRFSRIMSSGIEHAKRMAAYKAVDANFPPHAKVVGIGSGSTVVYVAERIGQLKNKHDFVCISTGFQSKQLIIDNGLTLGAIEQFPKVDIAFDGADEVDTNLNLIKGGGACLFQEKLVASSADKFIVVADTRKKSPSDLGIAWRKGVPIEVVPNSYAVVTRQLKELGAKSVVLRQGGGAKAGPVVTDNNNFLIDADFGSISDPGSLHQQIKLLVGVVETGLFVDMAHTAYFGDESGEVSEQLR

SEQ ID NO: 3214 - DNA, 714 bp, Pichia stipitis
  CDS (1)..(714): transl_table=12
atgtcgtctctctcccttgtggaacaagcaaagaaatccgctgcctaccaagctgtggatgagaattttcccgtctctgccaaggtcgtgggtattggatctggctcgactgtcgtttacgtagctgaacgtattggtcaactagccaacaaggactcgttcgtttgcattcctactggattccaatctaaacagttgattatcgacaatggcttgaagttgggtgctattgagcagtttccagaaattgacattgctttcgatggtgctgatgaagtggaccctgccttgaacttgattaaaggtgggggtgcctgtttgttccaggaaaagttggtagcagccagtgcaaagacatttgtagttgtggcagactaccgtaagaagtctgacaacttgggtatccagtggaaacagggtgttcctatagaaatcgtgcctaactcgtatgctaaagtcatccaagacttgaaaaaattgggtgcaatcactgtgaatctcagacaaggaggttcggctaaggctggtccaattatcaccgacaacaacaacttcttgctcgatgccgattttggcgccatcaaggacccaaaggctttgcacgaccagatcaaggcccttgtaggtgtagttgaaactggcttgttcacatcgatggctgcgaagtcatactttggcgaacaggatggtcaggtcaatatctggtctatctag

SEQ ID NO: 3215 - protein, 237 aa, Pichia stipitis
MSSLSLVEQAKKSAAYQAVDENFPVSAKVVGIGSGSTVVYVAERIGQLANKDSFVCIPTGFQSKQLIIDNGLKLGAIEQFPEIDIAFDGADEVDPALNLIKGGGACLFQEKLVAASAKTFVVVADYRKKSDNLGIQWKQGVPIEIVPNSYAKVIQDLKKLGAITVNLRQGGSAKAGPIITDNNNFLLDADFGAIKDPKALHDQIKALVGVVETGLFTSMAAKSYFGEQDGQVNIWSI

SEQ ID NO: 3216 - DNA, 657 bp, Picrophilus torridus
  CDS (1)..(657): transl_table=11
atgtttgaaaatgaaaaaaggatggccgccatggaggccctgaaatttgtcaggaacgatatgcgcataggtataggaacaggctcaacggcatactacttcattgagggtttatcagagcttgttaaaaatggcctgaggataaccggaattccaacatcgaagaagagcgaggaactctgcagatcattcaatataccggtcgattataatataaaggatatagacatagacttcgatggtgcagacgaattcgatccatatggaaatctaataaagggtggtggcggcgcacttgtgcgtgaaaagatcgttgcatacaacagcagggaattctacgttcttgtcgaccattcaaagtactctgaaaggcttcataagtttccgctgcccgtggaggtgcttccatttatgagtgaaaagacccttgaaaacatagagaggcttggatgcagggcatcattccgggatgataaaaaattcatcagcgacaatggcaattacataatagactgcgtttttagttatacagacccggagcttgaatcacagataaagatgatacctggagttgttgaggttggaatattcaggcatctttcaacaaagatattccagggaacaattgatggctgcagaataatagatgttaaataa

SEQ ID NO: 3217 - protein, 218 aa, Picrophilus torridus
MFENEKRMAAMEALKFVRNDMRIGIGTGSTAYYFIEGLSELVKNGLRITGIPTSKKSEELCRSFNIPVDYNIKDIDIDFDGADEFDPYGNLIKGGGGALVREKIVAYNSREFYVLVDHSKYSERLHKFPLPVEVLPFMSEKTLENIERLGCRASFRDDKKFISDNGNYIIDCVFSYTDPELESQIKMIPGVVEVGIFRHLSTKIFQGTIDGCRIIDVK

SEQ ID NO: 3218 - DNA, 717 bp, Prochlorococcus marinus
  CDS (1)..(717): transl_table=11
atggcggaccttcaaactcagatgaagcaagcggtggcggcagccgctgtggagcagatcaaagatggcatggttcttggtttgggctcaggctcgacggcagctctgatgatccaggctcttggtgccaagctggccagtggtgagcttcgggagattgttggcgttaccacctctttccaaggcgaagtgatggctgcggagttggggattcccttgcgcaacctcacggccgtggatcgcatcgacttggcgatcgatggagctgatgaagttgatccctcttttcagttaattaaaggtggcggggcctgccatgtgcaggagaagcttgtcgccagtagagcggatcgctttgtggttgttgttgattccacaaagattgttgatcggctcaaccttggttttttacttccggttgaggtcttgcctggtgcttggcgacaggtgcagggtcgcttggctgagttgggcggtattgctgatttgcgtatggctcagtgcaaggctggtcctgtggtcaccgatcagggcaatctcgttttggatgtgagcatggccggagggattggtgaccctgaggatttggagtgtcgaattaacaatcttccgggtgtcttggagaacggtttgttcgtcaatctcaccgatgaagttttggttggccagattagtgatggtgttgcgggagtgcgtcgtctacagcgccgtgagtag

SEQ ID NO: 3219 - protein, 238 aa, Prochlorococcus marinus
MADLQTQMKQAVAAAAVEQIKDGMVLGLGSGSTAALMIQALGAKLASGELREIVGVTTSFQGEVMAAELGIPLRNLTAVDRIDLAIDGADEVDPSFQLIKGGGACHVQEKLVASRADRFVVVVDSTKIVDRLNLGFLLPVEVLPGAWRQVQGRLAELGGIADLRMAQCKAGPVVTDQGNLVLDVSMAGGIGDPEDLECRINNLPGVLENGLFVNLTDEVLVGQISDGVAGVRRLQRRE

SEQ ID NO: 3220 - DNA, 714 bp, Prochlorococcus marinus
  CDS (1)..(714): transl_table=11
ttgaattcacaaactcaaatgaaacaaatagttgctgaagcagcaattgaggaagtaaagagtgacatgattctcggattaggatctggttctacagctgtgcttatgataaaaagccttgctgatgcaattcgttctggaaaactgcaaaatataaaaggtgttgcaacttcctttcaatcagaagttttagcgctcgaactggatatcccacttattgatttggcttctgtttctcaaatcgatttagctattgatggagcagatgaagttgatccgggttttcaattaattaaagggggaggagcatgtcatgttagagaaaagttagtggcatctaaagctaatcaattgttgattgttgttgacgaaacgaaactcgtacgaaaattaaatcaatcttttcctttacctgtagaagttcttccaaatgcttggaaacaagttcaggaagtgatttcagaaatgaatggcatttctactttaagaatggcgactaaaaaagctggcccagttgttactgatcagggcaatctaatcctagatgtattgtttaatgatggtattaagaatccaaaagatattgaaaagagtattaataatattccaggagtattagaaaatggattattcattgaccttacagacaaagtattggttggtaaaattgaaaacaatattcctgttgcttactctcccgcaaaagttggctaa

SEQ ID NO: 3221 - protein, 237 aa, Prochlorococcus marinus
MNSQTQMKQIVAEAAIEEVKSDMILGLGSGSTAVLMIKSLADAIRSGKLQNIKGVATSFQSEVLALELDIPLIDLASVSQIDLAIDGADEVDPGFQLIKGGGACHVREKLVASKANQLLIVVDETKLVRKLNQSFPLPVEVLPNAWKQVQEVISEMNGISTLRMATKKAGPVVTDQGNLILDVLFNDGIKNPKDIEKSINNIPGVLENGLFIDLTDKVLVGKIENNIPVAYSPAKVG

SEQ ID NO: 3222 - DNA, 714 bp, Prochlorococcus marinus
  CDS (1)..(714): transl_table=11
atgacagatctgcaaacacaaatgaaaatagcggtagctcaagaggctatcggtgagataaaagacggaatgatccttggtcttggctcagggtctactgctgctttgatgattaagtctttaggtgaaaaacttaaagaaggttccctcaaagagataattggtgttccaacttctttccaaggcgaagtacttgcttctcagcttgggatacctttaagagctttttcagcagttagcaaaatcgatttagccatagatggtgctgatgaggtggatcctaattttcagctaattaagggaggaggggcttgccatgttcaagagaaacttgttgcttctattgcagatcgttttgttgtagtggttgattcaactaaaattgtagagaagttaaatctcgaatttaagcttcctgttgaggtgttacctgcggcttggaaattggtccaaaaggagctgaatgacttaggagcaaaatctgatcttcgaatggcggagaaaaaagctgggccaattgttactgatcaagggaacttagtccttgatgtgcaatttgcagatggaatttcagatcctcagaatcttgaaaaacaaataaataattttccaggagttttggagaatggtttatttgtcaatctgacagatgaagttttggttggtgaaattaaaaatggtgtatcgagtgttaatcgtctgaagaaggcttag

SEQ ID NO: 3223 - protein, 237 aa, Prochlorococcus marinus
MTDLQTQMKIAVAQEAIGEIKDGMILGLGSGSTAALMIKSLGEKLKEGSLKEIIGVPTSFQGEVLASQLGIPLRAFSAVSKIDLAIDGADEVDPNFQLIKGGGACHVQEKLVASIADRFVVVVDSTKIVEKLNLEFKLPVEVLPAAWKLVQKELNDLGAKSDLRMAEKKAGPIVTDQGNLVLDVQFADGISDPQNLEKQINNFPGVLENGLFVNLTDEVLVGEIKNGVSSVNRLKKA

SEQ ID NO: 3224 - DNA, 717 bp, Prochlorococcus marinus
  CDS (1)..(717): transl_table=11
atggcggaccttcaaactcagatgaagcaagcggtggcggcagccgctgtggagcagatcaaagatggcatggttcttggtttgggttcaggctcgacggcagctctgatgatccaggctcttggtgccaagctggccagtggtgagcttcgggacattgttggcgttaccacctctttccaaggcgaagtgatggctgcggagttggggattcccttgcgcaacctcacggccgtggatcgcatcgacttggcgatcgatggagctgatgaagttgatccctcttttcagttaattaaaggtggcggggcctgccatgtgcaggagaagcttgtcgccagtagagcggatcgctttgtggttgttgttgattccacaaagattgttgatcggctcaaccttggttttttacttccggttgaggtcttgcctggtgcttggcgacaggtgcagggtcgcttggctgagttgggcggtattgctgatttgcgtatggctcagtgcaaggctggtcctgtggttaccgatcagggcaatctcgttttggatgtaagcatggccggaggtattggtgaccctgaggatctggagtgtcgaattaacaatcttccgggtgtcttagagaacggtttgttcgtcaatctcaccgatgaagttttggttggccagattagtgatggtgttgcgggagtgcgtcgtctacagcgccgtgagtag

SEQ ID NO: 3225 - protein, 238 aa, Prochlorococcus marinus
MADLQTQMKQAVAAAAVEQIKDGMVLGLGSGSTAALMIQALGAKLASGELRDIVGVTTSFQGEVMAAELGIPLRNLTAVDRIDLAIDGADEVDPSFQLIKGGGACHVQEKLVASRADRFVVVVDSTKIVDRLNLGFLLPVEVLPGAWRQVQGRLAELGGIADLRMAQCKAGPVVTDQGNLVLDVSMAGGIGDPEDLECRINNLPGVLENGLFVNLTDEVLVGQISDGVAGVRRLQRRE

SEQ ID NO: 3226 - DNA, 696 bp, Prochlorococcus marinus subsp
  CDS (1)..(696): transl_table=11
atgaaacaaatagttgctgactcagctattgaagaagtagaagatggaatgatcttaggtttaggatctggatcaacagcagcacttatgataaaaagtcttgctgaaaaaatcagatcaggcaaattaaaaaatattaaaggagtcccgacttcctttcaatcagaggtgcttgcattagaactcaatatccctttaattgatttagcttcagttccttacattgatttagccattgatggagcggatgaagtagatcctgactttcaactcatcaagggtgggggagcttgccatgtccgagaaaaattggttgcatctaaagcaaataaattattaattgttattgatgaatcaaagttagtgcaaaatttaaaccaagttttccctctccctgtggaggttatgccttctgcgtggaagcaggtgaaggatataatttcagaaatgagtggagtttctaatttaaggatggcaacaaaaaaagcaggcccagttgtcacggatcaaggtaatttgattttggatgttttatttgatgctggcataagagatccaaaagatttagaaatgcgtattaataatattcctggagtcttggaaaatggattatttgttgatttagcagataaggttttggtgggtaaaattgaagatgacgttccagtattattttcaccttctaggagaagttaa

SEQ ID NO: 3227 - protein, 231 aa, Prochlorococcus marinus subsp
MKQIVADSAIEEVEDGMILGLGSGSTAALMIKSLAEKIRSGKLKNIKGVPTSFQSEVLALELNIPLIDLASVPYIDLAIDGADEVDPDFQLIKGGGACHVREKLVASKANKLLIVIDESKLVQNLNQVFPLPVEVMPSAWKQVKDIISEMSGVSNLRMATKKAGPVVTDQGNLILDVLFDAGIRDPKDLEMRINNIPGVLENGLFVDLADKVLVGKIEDDVPVLFSPSRRS

SEQ ID NO: 3228 - DNA, 672 bp, Pseudomonas syringae pv
  CDS (1)..(672): transl_table=11
atgacccaggatcaactcaaacaggcagtcgcccaagcagctgtcgacttcatccttccgaagctcgatgacaaaagcattgtgggcgtcggcaccggctccacggccaattgctttattgatgcgctggctaaacacaaggcggcattcgatggcgcagtcgccagctcggaagctaccgccgcgcgcctcaagggccatggcattccggtgtatgagctgaacacggtcagcgacctggagttctatgtcgatggtgccgacgaaagcgacgagcacctgaacctgatcaagggcggcggcgcggcactgactcgcgagaaaatcgtcgcggccgtggccaagaccttcatctgtatcgccgacggcagcaagctggtgccggtgctgggcgcgttcccgctgccggtcgaagtcattccgatggcccgcagccacgttgcgcgacaactggtgaaactgggcggcgacccggtttatcgcgaaggtgttctaaccgacaacggcaatatcatcattgatgtgcacaacatgagcatcaccaatccggtggagctggaagcacagatcaacgccatcgtcggcgtggtcaccaatggcctgttcgccgcccgtccggccgacctgttgctgctgggcaccaccgaaggcgtgaaaaccctgacgcgctga

SEQ ID NO: 3229 - protein, 223 aa, Pseudomonas syringae pv
MTQDQLKQAVAQAAVDFILPKLDDKSIVGVGTGSTANCFIDALAKHKAAFDGAVASSEATAARLKGHGIPVYELNTVSDLEFYVDGADESDEHLNLIKGGGAALTREKIVAAVAKTFICIADGSKLVPVLGAFPLPVEVIPMARSHVARQLVKLGGDPVYREGVLTDNGNIIIDVHNMSITNPVELEAQINAIVGVVTNGLFAARPADLLLLGTTEGVKTLTR

SEQ ID NO: 3230 - DNA, 672 bp, Pseudomonas aeruginosa
  CDS (1)..(672): transl_table=11
atgaaccaggatcagctcaagcaggcagtggcacaggccgccgtcgaccacattcttccgcacctcgacagcaagagcatcgtcggcgtcggcacaggctccaccgccaacttcttcatcgatgccctggcccgccacaaggccgagttcgacggcgcagtggccagttcggaggccaccgccaagcgcctgaaggaacatggcatcccggtctacgagctgaacacggtcagcgagctggagttctacgtcgacggcgccgacgaaagcaacgagcgcctggagctgatcaagggcggcggtgccgcgctgacccgcgagaagatcgtcgccgcggtggccaagaccttcatctgcatcgccgatgccagcaagctggtacccatcctcggccagttcccgctgccggtggaggtcatcccgatggctcgcagccacgtcgcccgccaactggtgaagctcggcggcgatccggtctaccgcgaaggcgtgctgaccgacaacggcaatatcatcctcgacgtgcacaacctgcgcatcgacagcccggtggaactggaagagaagatcaacgccatcgtcggcgtggtcaccaacggcctgttcgccgcccgcccggccgacctgctgctgctcggcaccgccgacggcgtcaagaccctcaaggcctga

SEQ ID NO: 3231 - protein, 223 aa, Pseudomonas aeruginosa
MNQDQLKQAVAQAAVDHILPHLDSKSIVGVGTGSTANFFIDALARHKAEFDGAVASSEATAKRLKEHGIPVYELNTVSELEFYVDGADESNERLELIKGGGAALTREKIVAAVAKTFICIADASKLVPILGQFPLPVEVIPMARSHVARQLVKLGGDPVYREGVLTDNGNIILDVHNLRIDSPVELEEKINAIVGVVTNGLFAARPADLLLLGTADGVKTLKA

SEQ ID NO: 3232 - DNA, 672 bp, Pseudomonas fluorescens
  CDS (1)..(672): transl_table=11
atgacccaggatcaactcaaacaggccgttgcccaggccgccgtcgaccttatcctcccgaaactcgatgacaagagcatcgtcggggtcggcaccggctccaccgccaactgcttcatcgacgccctggccctgcacaagggcaccttcgacggcgccgtggccagctccgaagccaccgccgcgcgcctcaagggccacgggattccggtctacgagctcaacaccgtgagcgacctggagttctacatcgacggcgccgacgaaagcgacgagcacctgaacctgatcaagggcggcggcgccgccctgactcgggaaaagatcgtcgccgccgtggccaagacgttcatctgcatcgccgacgccagcaagctggtgccggtgctgggcaacttcccgctgcccgtggaagtgatccccatggcccgcagccacgtggcccgtgaactggtgaaactgggcggcgacccggtgtaccgcgaaggcgtgatcaccgacaacggcaacatcatcctcgatgtgcacaacatgcagatcaccaatccggtggaactggaaagccagatcaatgccattgtcggcgtggtcaccaatggcctgttcgctgcacgccccgctgatgtgctgctgctgggtaccgccgaaggggtgaagaccctcaaggcctga

SEQ ID NO: 3233 - protein, 223 aa, Pseudomonas fluorescens
MTQDQLKQAVAQAAVDLILPKLDDKSIVGVGTGSTANCFIDALALHKGTFDGAVASSEATAARLKGHGIPVYELNTVSDLEFYIDGADESDEHLNLIKGGGAALTREKIVAAVAKTFICIADASKLVPVLGNFPLPVEVIPMARSHVARELVKLGGDPVYREGVITDNGNIILDVHNMQITNPVELESQINAIVGVVTNGLFAARPADVLLLGTAEGVKTLKA

SEQ ID NO: 3234 - DNA, 675 bp, Pseudomonas fluorescens
  CDS (1)..(675): transl_table=11
atgacccaggatcaactcaaacaggccgtggcccaggccgccgtcgacttcatccttccgaaactcgacgacaagagcatcgtcggtgtcggcaccggctccaccgccaactgcttcatcgacgccctggcccagcacaagggcgcgttcgatggcgcggtcgcgagctccgaagccaccgccgcgcgcctcaagggccacgggattccggtgtacgagctgaacaccgtgagcaacctggagttctacgtcgacggcgccgatgaaagcgacgaacacctgaacctgatcaagggcggcggcgcagccctgacccgcgagaagatcgtcgcggccgtggcccagaccttcatctgcatcgccgacgccagcaaactggtgccggtgctgggcgcgttcccgctgccggtggaagtgatcccgatggcccgcagccacgtggcccgccaactggtaaaactgggcggcgacccggtctaccgcgaaggcgtgctgaccgacaacggcaacatcatcctcgacgtgcacaacctgcagatcaccaatccggtggagctggaagcgcagatcaacgcgatcgtcggcgtggtcaccaacggcctgttcgcggcgcgtccggcggatttgttgttgctgggtacttccgaaggtgtgaaaacactgaaggctgagtaa

SEQ ID NO: 3235 - protein, 224 aa, Pseudomonas fluorescens
MTQDQLKQAVAQAAVDFILPKLDDKSIVGVGTGSTANCFIDALAQHKGAFDGAVASSEATAARLKGHGIPVYELNTVSNLEFYVDGADESDEHLNLIKGGGAALTREKIVAAVAQTFICIADASKLVPVLGAFPLPVEVIPMARSHVARQLVKLGGDPVYREGVLTDNGNIILDVHNLQITNPVELEAQINAIVGVVTNGLFAARPADLLLLGTSEGVKTLKAE

SEQ ID NO: 3236 - DNA, 675 bp, Pseudomonas putida
  CDS (1)..(675): transl_table=11
atgacccaggaccaactcaaacaggccgtcgcccaggccgctgtcgacttcattctgcccaagctggatgaaaagagcgttgtcggcgtcggtaccggttcgaccgccaacttcttcatcgacgccctggctcagcacaagaccgccttcgacggcgcagtcgccagctccgaagccactgcccagcgcctgaagggccatggcatcccggtgtacgagctgaacagcgtcagcgagcttgagttctacgtggacggcgccgacgaaagcgacgcgcacctgaacctgatcaagggcggcggcgcagccctgacccgcgagaagatcgtcgcggccgtggccaagaccttcatctgcatcgccgacggtagcaagctggtgcccgtgctgggcgccttcccgctgccggttgaagtgatcccgatggcccgcagccacgtggcgcgccagctggtcaagctgggcggcgacccggtgtaccgcgaaggcgtggtcaccgacaacggcaacgtgatcctcgacgtgcacaacctgcagatcaccaacccggtggagctggaagcgcagatcaacgccatcgttggcgtggtcaccaacggcctgttcgcggcgcgaccggcggacctgctgctgctgggcacctctgaaggtgtgaagagcctgaaggccgagtaa

SEQ ID NO: 3237 - protein, 224 aa, Pseudomonas putida
MTQDQLKQAVAQAAVDFILPKLDEKSVVGVGTGSTANFFIDALAQHKTAFDGAVASSEATAQRLKGHGIPVYELNSVSELEFYVDGADESDAHLNLIKGGGAALTREKIVAAVAKTFICIADGSKLVPVLGAFPLPVEVIPMARSHVARQLVKLGGDPVYREGVVTDNGNVILDVHNLQITNPVELEAQINAIVGVVTNGLFAARPADLLLLGTSEGVKSLKAE

SEQ ID NO: 3238 - DNA, 672 bp, Pseudomonas syringae pv
  CDS (1)..(672): transl_table=11
atgacccaggatcaactcaaacaggcagtcgcccaagccgctgtcgatttcatccttccaaagctcgacgacaagagcattgtgggcgtcggcaccggttccacagccaactgcttcattgatgcactggccaaacacaagggtgcgttcgacggcgcagtcgccagctccgaagccaccgctgcacgcctcaagggccacggtattccggtctatgagctgaacaccgtcagcgacctggagttctacgtcgatggcgccgatgaaagcgacgagcatctgaacctgatcaagggcggcggtgcagcgctgactcgcgagaagatcgtcgcggcagtggccaagaccttcatctgcatcgccgacggcagcaagctggtgccagtgctgggcgcattcccgctgccggttgaagttgtgccgatggcgcgcagccacgttgcgcggcaactggtgaagctgggcggcgacccggtctaccgtgaaggcgtgctgaccgacaacggcaatatcatcatcgacgtgcacaatatgagcatcaccaacccggtagagctggaagcgagcatcaacgccatcgtcggcgtggtcaccaacggcctgttcgccgctcgcccggctgacctgctgctgctgggcaccgccgaaggcgtgaagaccctaacacgctga

SEQ ID NO: 3239 - protein, 223 aa, Pseudomonas syringae pv
MTQDQLKQAVAQAAVDFILPKLDDKSIVGVGTGSTANCFIDALAKHKGAFDGAVASSEATAARLKGHGIPVYELNTVSDLEFYVDGADESDEHLNLIKGGGAALTREKIVAAVAKTFICIADGSKLVPVLGAFPLPVEVVPMARSHVARQLVKLGGDPVYREGVLTDNGNIIIDVHNMSITNPVELEASINAIVGVVTNGLFAARPADLLLLGTAEGVKTLTR

SEQ ID NO: 3240 - DNA, 672 bp, Pseudomonas syringae pv
  CDS (1)..(672): transl_table=11
atgacccaggatcaactcaaacaggcagtcgcccaggcagctgtcgacttcatccttccgaagctcgatgacaaaagcattgtgggcgtcggcaccggctccacggccaactgcttcatcgacgcgctggcaaagcacaaggccgcctttgacggtgctgtcgccagctcgcaagccactgcggcgcgcctgaaggcgcacggcattccggtctatgagctgaacacggtcagcgatctggagttctatgtcgacggcgccgacgaaagcgacgagcacctgaatctgatcaagggcggcggcgcggcactgactcgcgaaaaaatcgtcgcggcggtggccaataccttcatctgcatcgccgacggcagcaagctggtgccagtgctgggcgcgttcccgctgccggtcgaagtcattccgatggcccgtagccacgtggcgcggcaactggtgaaactgggcggcgacccggtttatcgcgaaggtgttctgaccgacaacggcaacatcatcattgatgtgcacaacatgagcattaccaacccggtggagctggaagcgcagatcaacgccatcgtcggcgtggtcaccaatggcctgttcgccgcccgtccggccgacctgttgctgctgggtaccgctgaaggcgtgaaaaccctgacgcgctga

SEQ ID NO: 3241 - protein, 223 aa, Pseudomonas syringae pv
MTQDQLKQAVAQAAVDFILPKLDDKSIVGVGTGSTANCFIDALAKHKAAFDGAVASSQATAARLKAHGIPVYELNTVSDLEFYVDGADESDEHLNLIKGGGAALTREKIVAAVANTFICIADGSKLVPVLGAFPLPVEVIPMARSHVARQLVKLGGDPVYREGVLTDNGNIIIDVHNMSITNPVELEAQINAIVGVVTNGLFAARPADLLLLGTAEGVKTLTR

SEQ ID NO: 3242 - DNA, 690 bp, Pyrococcus abyssi
  CDS (1)..(690): transl_table=11
atgaacattgaggaaatgaagaaaattgctgccaaggaggcattaaagttcattgaggatgacatggtaatagggttaggaacgggttcaactactgcctactttataagactcctgggcgacatgataaagaagggagaagtaagcgatattgtaggcgttccaacttcttatcagtcaagattgcttgccatagagagcggaattccagttgctacgctggatcaagttgatgcaatagatgtagctgtggatggagcggatgaggttgatccaaatttaaacctaatcaagggcagaggtgcagcgcttacaatggaaaagataattgagtcgagggcaggcatgttcattgttttagttgatgagaggaaactcgttgattacctatgccaaaaaatgcccgttcctatagaggtgattcctcaagcgtggagggccatagtggaggagctcagcatattcaatgctgaagcgaagctcaggatgggagttaacaaggatggcccggtgataactgacaatggaaacttcataatagatgcgaagtttccgaggatagatgatccacttgacatggagatagaactgaacaccatacctggagttgtggaaaacggcatatttgcggatatagctgatatcgttatagtcggaaccaaggagggggttaaaacacttgaaaggtga

SEQ ID NO: 3243 - protein, 229 aa, Pyrococcus abyssi
MNIEEMKKIAAKEALKFIEDDMVIGLGTGSTTAYFIRLLGDMIKKGEVSDIVGVPTSYQSRLLAIESGIPVATLDQVDAIDVAVDGADEVDPNLNLIKGRGAALTMEKIIESRAGMFIVLVDERKLVDYLCQKMPVPIEVIPQAWRAIVEELSIFNAEAKLRMGVNKDGPVITDNGNFIIDAKFPRIDDPLDMEIELNTIPGVVENGIFADIADIVIVGTKEGVKTLER

SEQ ID NO: 3244 - DNA, 690 bp, Pyrococcus furiosus
  CDS (1)..(690): transl_table=11
atgaatgtggaagaaatgaaaaaggccgtggcaagggcagcacttgagtttatagaggatgatatggtggttggactaggaacaggctccaccacagcatactttataagatatttaggagagatgatagaaaaaggaaaagtagaagatatctatggagtaccacctcctatcaagcaaaaattcttgcgtatggaaagtggggtgccagttctttcattggatcaagtagatgcaatagacatagcggtagatggtgctgatgaagtagatccaaatcttaacttaatcaaaggcaggggtgctgccctcacaatggaaaaaataatcgagtatagggctggaacattcatcgtgctggtggatgagtcaaagcttgtcgattatctctgccagaaaatgccagttccaattgaagttattccagctgcatggaaggcgattttagaagagttaagcatattcaatgcaaaggctgagctcaggatgggagttaaaaaggatggtccagttgttactgaaaatgggaactttatcattgatgcaaaatttccaagaatagatgatcccctcgacatggaaatcgaacttaacactatcccaggagtagttgaaaatggaatttttgccgatatagcggacatagtattagtagggacaaaagaaggagtaaaaagattagaaaggtaa

SEQ ID NO: 3245 - protein, 229 aa, Pyrococcus furiosus
MNVEEMKKAVARAALEFIEDDMVVGLGTGSTTAYFIRYLGEMIEKGKVEDIYGVPPPIKQKFLRMESGVPVLSLDQVDAIDIAVDGADEVDPNLNLIKGRGAALTMEKIIEYRAGTFIVLVDESKLVDYLCQKMPVPIEVIPAAWKAILEELSIFNAKAELRMGVKKDGPVVTENGNFIIDAKFPRIDDPLDMEIELNTIPGVVENGIFADIADIVLVGTKEGVKRLER

SEQ ID NO: 3246 - DNA, 690 bp, Pyrococcus horikoshii
  CDS (1)..(690): transl_table=11
atgaacgttgaagagatgaaaaagattgcagctaaagaggctttgaaattcattgaagatgacatggttatagggttagggacaggatcaacaacggcatacttcattaaactgttgggagagaaattaaagaggggagaaatatcggatatagtaggggttcctacatcttaccaggcaaagctacttgcgatagagcatgatattccaatagcttctttagatcaagttgatgccatagatgttgccgttgatggtgctgatgaggtggatcctaatttaaacttaattaaaggtaggggagcagcgttaacaatggaaaagatcattgaatatagggctggtacatttattgtcctggttgatgaaaggaagctcgtcgattacctctgtcaaaagatgccggttccaattgaggtaattccgcaggcgtggaaggcaataatagaagagctttctatctttaatgcaaaagctgaactaagaatgggggtcaataaagacggacccgtaatcacggataatgggaacttcataatagatgcgaagttccctaggatagatgatcccctggacatggagatagaactgaacacaattccgggggtaattgaaaacgggatatttgcagacatagcggatatagttatagttggaacgagagagggcgtcaagaaacttgaaaggtaa

SEQ ID NO: 3247 - protein, 229 aa, Pyrococcus horikoshii
MNVEEMKKIAAKEALKFIEDDMVIGLGTGSTTAYFIKLLGEKLKRGEISDIVGVPTSYQAKLLAIEHDIPIASLDQVDAIDVAVDGADEVDPNLNLIKGRGAALTMEKIIEYRAGTFIVLVDERKLVDYLCQKMPVPIEVIPQAWKAIIEELSIFNAKAELRMGVNKDGPVITDNGNFIIDAKFPRIDDPLDMEIELNTIPGVIENGIFADIADIVIVGTREGVKKLER

SEQ ID NO: 3248 - DNA, 690 bp, Pyrococcus kodakaraensis
  CDS (1)..(690): transl_table=11
atgaacgttgaagaaatgaaaaaggccgtagccaaggaggccctcaagttcattgaggatgagatggtagttgggcttgggaccggctcaacgaccgcctactttatcaattacctcggaaagctcctcatggaaggggagcttgaggacgtttacggcgttccaacttctcaccaggccagacttcttgcccttgaggcgggaattcccgttgtgagccttgacgaagtggatgcaatagacatagccgtggacggggccgatgaagttgacccgcacatgaacctgataaaggggcgcggcgctgccctcactatggaaaaaatcatcgagtatagggccgggatgttcatcgtcctggtcgatgagagcaagctcgttgagtacctgggccagaagatgcccgtgccgattgaggtcatacctgccgcgtggagggcaatcgctgaggaacttgaggtcttcaacgcgacagcggagctcagaatggcggtgaaaaaggacggcccggtcgttactgacaacggcaacttcatactggacgccaagttcgcccgcatcgaggatccgctcgacctcgaaatcgagcttaacacaatacccggtgtggttgagaacggaatattcgccgacatcgccgacataatcctcgttgggactccagaaggcgttaagagaatggagaggtga

SEQ ID NO: 3249 - protein, 229 aa, Pyrococcus kodakaraensis
MNVEEMKKAVAKEALKFIEDEMVVGLGTGSTTAYFINYLGKLLMEGELEDVYGVPTSHQARLLALEAGIPVVSLDEVDAIDIAVDGADEVDPHMNLIKGRGAALTMEKIIEYRAGMFIVLVDESKLVEYLGQKMPVPIEVIPAAWRAIAEELEVFNATAELRMAVKKDGPVVTDNGNFILDAKFARIEDPLDLEIELNTIPGVVENGIFADIADIILVGTPEGVKRMER

SEQ ID NO: 3250 - DNA, 687 bp, Ralstonia solanacearum
  CDS (1)..(687): transl_table=11
atgacgcaggatgaactgaaggcgctggtggcccaggccgccgccgactacgtattggccaacgtgcccgagggcgccgtgctgggtgtcggcaccggttcgaccgccaacctgttcatcgacgcgatggcgccgcacaaggcgcgcttcgccggcgcggtgtcgagctcggaggcgtcgacgcgccgtctgcagggccacggttttgccgtgctggatctgaacgaggtcgatacgattcccgtctacgtggacggtgccgacgagatcgatgacacgggcgccatgatcaagggcggcggcggcgcgctgacgcgcgagaagatcgtcgcgtcggtggcaggacggttcgtctgcatcgccgacggcagcaagctggtcgatgtgctcggcgctttcccgctgccggtggaagtggtgccgatggcacgcgccgcagtagcgcgccagctggcggcgctgggcggccagccgcgcctgcgcatgaccaaggaaggccagatctaccagaccgacaacggcaatgtgatcctggatgtctccggcctgcggatcggcgagccgaagacgctcgaggcgcagatcaacgatattcccggcgtggtgacggtcggcctgttcgccaagcgcggcgccgatgtgctgctgctgggcaccgaagcgggcgtgcagcgccgcgacttctga

SEQ ID NO: 3251 - protein, 228 aa, Ralstonia solanacearum
MTQDELKALVAQAAADYVLANVPEGAVLGVGTGSTANLFIDAMAPHKARFAGAVSSSEASTRRLQGHGFAVLDLNEVDTIPVYVDGADEIDDTGAMIKGGGGALTREKIVASVAGRFVCIADGSKLVDVLGAFPLPVEVVPMARAAVARQLAALGGQPRLRMTKEGQIYQTDNGNVILDVSGLRIGEPKTLEAQINDIPGVVTVGLFAKRGADVLLLGTEAGVQRRDF

SEQ ID NO: 3252 - DNA, 699 bp, Rhizobium leguminosarum bv
  CDS (1)..(699): transl_table=11
atggatgcccgcgaaatgaagatcaaggccgccgaggccgcactcgcccatgtggaaagcgggatgcgtctcgggatcggcaccggcagcacggcggaagaattcgttcgcctgctggcggagaaggtcgcgggcggcttcagggtcgaaggcgttccgacgtccgaacgaaccgcgcggctctgcgtcgaactcggcgtgccgctgaagtcgctcgacgaactgccggcactcgacctgacgatcgatggcgccgacgaggtcgatcaggcgctcaggctgatcaagggcggcggcggcgcgctgttgcgcgaaaaaatcgtcgcggccgcctccgagcgaatgatcgtcattgccgacgagagcaagctggtggaaacgctcggcgctttcgcgctgccgatcgaggtcaatccgttcgggctcgtctcgacgcggatcgcgatcgaaaaggtcgcggcccggctaggtctttccggtgaactcgatctgcgccagtcgggtgacggagagtttaccacggatggcggccatcacatcatcgatgcatcttttggccgcattcctgatgcagaggcgctttcgagcgagctgaattccatacccggcgtcgttgaacacgggctctttatcaatatggcggcacttgcgatcattgccggtcctgcgggtgcgcgcacgctgcaggcaaacagataa

SEQ ID NO: 3253 - protein, 232 aa, Rhizobium leguminosarum bv
MDAREMKIKAAEAALAHVESGMRLGIGTGSTAEEFVRLLAEKVAGGFRVEGVPTSERTARLCVELGVPLKSLDELPALDLTIDGADEVDQALRLIKGGGGALLREKIVAAASERMIVIADESKLVETLGAFALPIEVNPFGLVSTRIAIEKVAARLGLSGELDLRQSGDGEFTTDGGHHIIDASFGRIPDAEALSSELNSIPGVVEHGLFINMAALAIIAGPAGARTLQANR

SEQ ID NO: 3254 - DNA, 732 bp, Rhizobium loti
  CDS (1)..(732): transl_table=11
atggatgcaagacagttgaaagtcgaggccgcgcgggccgcccttgcccatgtcagcgacggcatgcggctcggcatcggcaccggcacgactgccgaagagttcgtgcgactgctcgccgacaaggtcgccaccggcatgaccgtcatcggtgtgccgacgtccgagcgcaccgcggcactttgccgtgagcttggcgtgccgctgtcgacattggaggaaactcccgagctcgatcttacggtcgacggcgccgatgaggtcgatccggaactgaccttgatcaagggcggcggcggcgcactgctgcgcgaaaagatcgttgccgcagcctcgcagcgcatgatcgtcatcgccgaccgctcgaagatggtcgagacgctcggccggtttccgctgccgatcgaagtcaaccagttcggcctgcgcgccaccgagatcgccatagccaagacggctgcggatctcggcctttccggtccgattacattgaggatgacgggaggccaggcttttgttacagacggcggccattttatcctcgatgcatcttttggccgcattccggatacaagagcgctttcgaatgctctccacgccattccgggcgtggtcgagcatggtcttttcatcgggctggcgtcaacggccatcatcgccggcggcgacggcatccaaaccgtccatgccgcccgaaaaccagggagttctaccaaccatgatgttgcataa

SEQ ID NO: 3255 - protein, 243 aa, Rhizobium loti
MDARQLKVEAARAALAHVSDGMRLGIGTGTTAEEFVRLLADKVATGMTVIGVPTSERTAALCRELGVPLSTLEETPELDLTVDGADEVDPELTLIKGGGGALLREKIVAAASQRMIVIADRSKMVETLGRFPLPIEVNQFGLRATEIAIAKTAADLGLSGPITLRMTGGQAFVTDGGHFILDASFGRIPDTRALSNALHAIPGVVEHGLFIGLASTAIIAGGDGIQTVHAARKPGSSTNHDVA

SEQ ID NO: 3256 - DNA, 696 bp, Rhizobium meliloti
  CDS (1)..(696): transl_table=11
atggacgcccgccagatgaagatcaaggccgccgaagcggcacttgaacatgtcgaaagcggcatgcggcttggaataggcacaggctcgacggctgaagaattcgtccgattgctggccgagaaagtggcatccggctttcagatctccggcgttccgacgtccgagcggactgcgcgcctctgcctcgagctcggtgtgcctctaaagtcgctcgacgaactgccggaactggacctgacgattgacggggccgacgaggtcgacggaaagctgcgcctgatcaagggcggcggcggtgcgttgctgcgcgagaagatcgttgcgagcgcctcgacgcggatgatcgtcattgccgacgaatcgaaggtcgtggacgtgctgggcgctttcaagctgccgatcgagatcaatcctttcggccaggtcgccacgaggctcgcgatcgagaagaccgcctcgcggctgggtctggcaggggaaatcgtcgtacgatcctccggcgatggagtcttcatgaccgatggcggacacctcattctcgatgcatcttttggccgtattcctgatgcagatgcgctcgcggtggagctgaacgccatcccgggggtcgttgagcacgggcttttcatagatgtggcgtcgatggcgatcattgccggtcctgagggagcgcgcacgcttacggcgtcttga

SEQ ID NO: 3257 - protein, 231 aa, Rhizobium meliloti
MDARQMKIKAAEAALEHVESGMRLGIGTGSTAEEFVRLLAEKVASGFQISGVPTSERTARLCLELGVPLKSLDELPELDLTIDGADEVDGKLRLIKGGGGALLREKIVASASTRMIVIADESKVVDVLGAFKLPIEINPFGQVATRLAIEKTASRLGLAGEIVVRSSGDGVFMTDGGHLILDASFGRIPDADALAVELNAIPGVVEHGLFIDVASMAIIAGPEGARTLTAS

SEQ ID NO: 3258 - DNA, 699 bp, Rhodopseudomonas palustris
  CDS (1)..(699): transl_table=11
atggacaaggaagagttgaagcggcgggctgcggcgcgggcgctggaagaggtgcggggcggcatgaagctcggcctcgggaccggctcgacggccaagcatttcgttgaactacttggcgaaagggtgcggctcgggctcgaaatcatcggcgtgccgacgtcggaagtgacgcgcgcggatgccgagcgttgcggtatccggctgacgagcctcgacgagatcgaccgactcgacatcaccatcgacggtgccgacgaggtcgaccaccatctcgacctgatcaagggcggcggcggggcgctgctgcgcgagaagatcgtcgccgcggcttcggatcgcatgatcgtgatcgcggacgaatccaagctggtcgacactcttggccgcttcccgctgccgatcgaggtgatcccgttcggcctcggcgccacccgccgggcgctgcagaatgccttcacggccgccggctgcgacggcgaattaaagctccggcccggcaaagacggccatgctttcgtcaccgatggtggccactggatcctcgacgcccagctcgggcggatacccgatgctcctcgtctggcccagttgctgtccgtgattccgggcgtagtcgagcatgggttgtttgtcgggatggcgagcaccgtcgtgctggcaggggccgacggaattcgaaccatcgaacgcgcgtga

SEQ ID NO: 3259 - protein, 232 aa, Rhodopseudomonas palustris
MDKEELKRRAAARALEEVRGGMKLGLGTGSTAKHFVELLGERVRLGLEIIGVPTSEVTRADAERCGIRLTSLDEIDRLDITIDGADEVDHHLDLIKGGGGALLREKIVAAASDRMIVIADESKLVDTLGRFPLPIEVIPFGLGATRRALQNAFTAAGCDGELKLRPGKDGHAFVTDGGHWILDAQLGRIPDAPRLAQLLSVIPGVVEHGLFVGMASTVVLAGADGIRTIERA

SEQ ID NO: 3260 - DNA, 789 bp, Rhodobacter sphaeroides
  CDS (1)..(789): transl_table=11
atgcctgcagaactatccccgatcgacaccgccaaattcgccgccgcacgccgcgcggtggatctcgtgcaggacggcatgaagctgggcctcggcaccggctcgaccgccgcctggatggtgcgctgcctggccgagcgcgtgcgcgaggaggggctgcgggttcagggcgtcccgacctcgacccgcacggccgagctcgcccgcgctctgggcatccaggtggtgacgctggacgaggcgaagtggctcgacctgaccatcgacggggcggacgaattcgacgccgacttcaatctcatcaagggcggaggggccgctctgctgcaggagaagatcgtggcgaccgcctcggaccggatggtggtgatcgccgatgccgccaaggaagtggcgcatctgggcgcctttccgctgccggtcgaggtcatccccttcggctggcagagcacgaagatgctgatcgaggaaacgctcgagggcatggatgtgctgggccgcgaggtgacgctgcgcctctccggcgatgcgccgcttctgaccgacgagaagaactacatcctcgatctgcatctcaagcgcatcggcgagccgcgtccgctcgcgctggcgctgaaccagatcgcgggcgtcgtggaaaacggcctcttcatcgacatctgcgatacggtcgtggtcggccatggcgacgggcgggtgagcctgcgcgacctgcagtcggggcaggccgaggaaggatccatcgacatggaccgcgcccgcaacatcttcgccgatctgggagactga

SEQ ID NO: 3261 - protein, 262 aa, Rhodobacter sphaeroides
MPAELSPIDTAKFAAARRAVDLVQDGMKLGLGTGSTAAWMVRCLAERVREEGLRVQGVPTSTRTAELARALGIQVVTLDEAKWLDLTIDGADEFDADFNLIKGGGAALLQEKIVATASDRMVVIADAAKEVAHLGAFPLPVEVIPFGWQSTKMLIEETLEGMDVLGREVTLRLSGDAPLLTDEKNYILDLHLKRIGEPRPLALALNQIAGVVENGLFIDICDTVVVGHGDGRVSLRDLQSGQAEEGSIDMDRARNIFADLGD

SEQ ID NO: 3262 - DNA, 681 bp, Saccharophagus degradans
  CDS (1)..(681): transl_table=11
atgactcaagacgaattgaaacaagctgttgctcaagcggcgctagactatattttaccgcacctagaagacgacatgattttgggcataggtaccggctctacagcgcgcctttttatcgatttacttgccgcgcacaagggcaagtttgacggcgcggtttctagctcagaggcttccagcgagcaattaaaggggcacggcatacccgtttacgacctaaacagcgtagatagcctacctttttatatagatggtgccgacgaggccaacgcccaactgcaccttattaaaggcggtggcgcggcccttactcgcgaaaaaattattaccgccgtagccgacaaatttatctgcattgccgatgccagcaaagatgtagacgtattgggcaagttcccattacctgtagaagtgattccaatggcgcgcgcgcatgttgctagagaaatagtgaaattgggtggcaacccagtacaccgccaagattgcgttaccgataacggttgtcaaatactggatgtatacgacctcgccatccacgacgcaccagcacttgaagctaaactaaataacattgccggtgtggtcaccaatgggctatttgccctcaggccagccgatgtattgcttttgggcacaacgaacggggtagaaacccgatttgccgccaagccgtaa

SEQ ID NO: 3263 - protein, 226 aa, Saccharophagus degradans
MTQDELKQAVAQAALDYILPHLEDDMILGIGTGSTARLFIDLLAAHKGKFDGAVSSSEASSEQLKGHGIPVYDLNSVDSLPFYIDGADEANAQLHLIKGGGAALTREKIITAVADKFICIADASKDVDVLGKFPLPVEVIPMARAHVAREIVKLGGNPVHRQDCVTDNGCQILDVYDLAIHDAPALEAKLNNIAGVVTNGLFALRPADVLLLGTTNGVETRFAAKP

SEQ ID NO: 3264 - DNA, 660 bp, Salmonella arizonae
  CDS (1)..(660): transl_table=11
atgacgcaggatgaactgaaaaaagcggtaggatgggcggcacttcagtatgtacagcccggcaccattgtgggcgttggtaccggctcaacggccgcacactttattgatgcgctgggcacaatgaaaggccagattgaaggcgcggtctccagctcggacgcctcgactgaaaaactcaaaggcctcggtattcatgtgtttgatctcaatgaagtggatagcctgggcatctatgtcgacggcgcggatgaaatcaacggtcatatgcagatgatcaaaggtggcggcgcggcattaacccgtgagaaaattattgcttccgtggcggagaaatttatctgcattgcggatgcctctaaacaggtggatattcttggcaaattcccgctgccggtcgaagtgattccgatggcgcgcagcgcggtcgctcgtcaactggtgaagctgggcgggcgtccggagtaccgtcagggcgtggtcacggataacggcaacgtgattctggatgtttatggtatggaaatccttgatcccatcgcgctggaaaacgccattaacgcgattccgggtgtcgtgaccgtggggctgttcgccaaccgtggcgcggacgttgcactgattggcacgccggacggggttaaaaccattgtaaaatga

SEQ ID NO: 3265 - protein, 219 aa, Salmonella arizonae
MTQDELKKAVGWAALQYVQPGTIVGVGTGSTAAHFIDALGTMKGQIEGAVSSSDASTEKLKGLGIHVFDLNEVDSLGIYVDGADEINGHMQMIKGGGAALTREKIIASVAEKFICIADASKQVDILGKFPLPVEVIPMARSAVARQLVKLGGRPEYRQGVVTDNGNVILDVYGMEILDPIALENAINAIPGVVTVGLFANRGADVALIGTPDGVKTIVK

SEQ ID NO: 3266 - DNA, 660 bp, Salmonella choleraesuis
  CDS (1)..(660): transl_table=11
atgacgcaggatgaactgaaaaaagcggtaggatgggcggcacttcagtatgtacagcccggcaccattgtgggcgttggtacaggctcaacggccgcacactttattgatgcgctgggcacaatgaaaggccagattgaaggcgcggtctccagctcggacgcctcgactgaaaaactcaaaggcctcggtattcacgtgtttgatctcaacgaagtggatagcctgggtatctatgtcgacggcgcggacgaaatcaacggtcatatgcagatgatcaaaggcggcggcgcggcattaacccgtgagaaaattattgcttccgtggcggagaaatttatctgtattgcggatgcctctaaacaggtggatattcttggcaaattcccgttgccggtcgaagtgattccgatggcgcgcagcgcggtcgctcgtcaactggtgaagctgggcgggcgtccggagtaccgtcagaacgtggtcacggataacggcaacgtgattctggatgtttatggtatggaaatccttgatcccatcgcgctggaaaacgccattaacgcgattccgggcgtcgtgaccgtagggttgttcgccaaccgtggcgccgatgtcgcactgatcggcacgccggacggggtgaaaaccatcgtaaaatga

SEQ ID NO: 3267 - protein, 219 aa, Salmonella choleraesuis
MTQDELKKAVGWAALQYVQPGTIVGVGTGSTAAHFIDALGTMKGQIEGAVSSSDASTEKLKGLGIHVFDLNEVDSLGIYVDGADEINGHMQMIKGGGAALTREKIIASVAEKFICIADASKQVDILGKFPLPVEVIPMARSAVARQLVKLGGRPEYRQNVVTDNGNVILDVYGMEILDPIALENAINAIPGVVTVGLFANRGADVALIGTPDGVKTIVK

SEQ ID NO: 3268 - DNA, 825 bp, Schizosaccharomyces pombe
  CDS (1)..(825)
atggattcagcagaaaagaagttggatttgtctcccattgaattagctaagcgattggcttgtcatatggcggttgacgaaaattatcctgaaaatcccaaagtcattggtattggaagtggcagtaccgttgtatacgttgtcgagcgtttattgacaaagcctggcgttgatagtgttgttttcattcctactggtttccaatctaaacaattgattgtcaacaacggtttacgcctcggggatcctgattgctatccaaacgtggatgtgtcttttgacggtgctgatgaagtggatgacaatcttcagtgcattaagggtggtggtgcttgccttttccaggagaaattaattgccttcttagcaaagagacttgtaatcgttgccgattctcgtaaaaattcccatgtcctcggtgaatattggaaaaaaggtgttcccattgaagtaatgcccatggcctatgcttctattttaccccaactggtggaactcggtgctattgaacctaagcttcgtatgggtgctcctggaaaggctggtcctgttgttaccgataatggaaatttcatcattgatgctcatttcggtcttattaaaaaccccaaagaactttttgccaaaatcaaattattggttggtgtagtagaagttggcttattttgtgatatgatttcagccgtttattttggtagcaaagatggaagtgttaccgtcaaaaaagctagtggtgaaaaacacattattccggctcctgttactgctgctgctaatgaagtggatgccaaagtagctgaaacaaatgcaaagcctctcaattag

SEQ ID NO: 3269 - protein, 274 aa, Schizosaccharomyces pombe
MDSAEKKLDLSPIELAKRLACHMAVDENYPENPKVIGIGSGSTVVYVVERLLTKPGVDSVVFIPTGFQSKQLIVNNGLRLGDPDCYPNVDVSFDGADEVDDNLQCIKGGGACLFQEKLIAFLAKRLVIVADSRKNSHVLGEYWKKGVPIEVMPMAYASILPQLVELGAIEPKLRMGAPGKAGPVVTDNGNFIIDAHFGLIKNPKELFAKIKLLVGVVEVGLFCDMISAVYFGSKDGSVTVKKASGEKHIIPAPVTAAANEVDAKVAETNAKPLN

SEQ ID NO: 3270 - DNA, 660 bp, Shewanella oneidensis
  CDS (1)..(660): transl_table=11
atgactcaagatgaaatgaaaaaagctgcgggctgggctgcactcaaatacgttgagaaggacagcattgtgggtgtgggcacaggctcaaccgttaaccactttatcgatgctttggcgaccatgaaggctgatattgaaggcgcagtatcaagctctgaagcttcaacgcaaaaaatgaaggcccttggcatcccggtttatgacttaaacagcgtcgataaattatctgtctatgtcgatggtgccgatgaaatcaacggccacatggacatgatcaaaggtggtggcgcggcattaacccgcgaaaaaatcgttgcagctgtggctgaaaagtttgtctgtatcgtggataacactaagcaagtagatatcttgggtgaatttccactgcccgttgaagtgatcccgatggcgcgctcttacgtggctcgccaactggtaaaactgggtggtgatcctgtttaccgcgaaggcgttatcactgataacggtaatgtgatcctcgatgtttacaatcttaagatcctcaatccgaaagaattagaagataagatcaatgccattgtgggtgtggtcactaatggtctgttcgcaaaacgcggcgccgatgtgttactggttggtacccctgaaggcgttaaaacctttaccgcttga

SEQ ID NO: 3271 - protein, 219 aa, Shewanella oneidensis
MTQDEMKKAAGWAALKYVEKDSIVGVGTGSTVNHFIDALATMKADIEGAVSSSEASTQKMKALGIPVYDLNSVDKLSVYVDGADEINGHMDMIKGGGAALTREKIVAAVAEKFVCIVDNTKQVDILGEFPLPVEVIPMARSYVARQLVKLGGDPVYREGVITDNGNVILDVYNLKILNPKELEDKINAIVGVVTNGLFAKRGADVLLVGTPEGVKTFTA

SEQ ID NO: 3272 - DNA, 660 bp, Shewanella sp
  CDS (1)..(660): transl_table=11
atgactcaagatgaaatgaaaaaagccgctggctgggctgctctcaaatacgttgagaaagacagcattgtgggtgtaggcacaggctcaaccgtcaatcactttatcgatgccctcgccaccatgaaggccgatattgaaggtgcggtatcaagctcagaagcctcaacccaaaagatgaaagcccttggcatcccagtttatgacttaaacagcgtcgataaattatctgtgtatgtcgatggtgccgatgaaatcaacggccatatggacatgatcaaaggcggcggcgcggcattaacccgcgagaaaatcgttgcggctgtggctgaaaagtttgtctgtatcgtggataacactaaacaagtggatattttgggtaaattcccactgcccgttgaagtgatcccaatggcgcgctcttacgtggcccgtgaactggtcaaactcggcggcgaccctgtgtaccgtgaaggcgttgtcacggataacggcaacgtgatcctcgacgtttacaaccttaagatcatcaatcctaaggaattagaagagaagatcaacgccatcgtcggcgtagtcaccaacggcctgttcgcaaaacgcggcgccgatgtgttattggttggcacccctgaaggtgtaaaaacctttaccgcttaa

SEQ ID NO: 3273 - protein, 219 aa, Shewanella sp
MTQDEMKKAAGWAALKYVEKDSIVGVGTGSTVNHFIDALATMKADIEGAVSSSEASTQKMKALGIPVYDLNSVDKLSVYVDGADEINGHMDMIKGGGAALTREKIVAAVAEKFVCIVDNTKQVDILGKFPLPVEVIPMARSYVARELVKLGGDPVYREGVVTDNGNVILDVYNLKIINPKELEEKINAIVGVVTNGLFAKRGADVLLVGTPEGVKTFTA

SEQ ID NO: 3274 - DNA, 660 bp, Shewanella sp
  CDS (1)..(660): transl_table=11
atgactcaagatgaaatgaaaaaagccgctggctgggctgctctcaaatacgttgagaaagacagcattgtgggtgtaggcactggctcaaccgtcaatcactttatcgatgccctcgccaccatgaaggccgatattgaaggtgcggtatcaagctcagaagcctcaacccaaaaaatgaaagcccttggcatcccagtttatgacttaaacagcgtcgataaattatctgtgtatgtcgatggtgccgatgaaatcaacggccatatggacatgatcaaaggcggcggcgcggcattaacccgcgagaaaatcgttgcggctgtggctgaaaagtttgtctgtatcgtggataacactaaacaagtggatattttgggtgaattcccactgcccgttgaagtgatcccaatggcgcgttcttacgtggcccgtgaactcgtcaaactcggcggcgacccagtgtaccgtgaaggcgttgtgactgataacggcaacgtaatcctcgacgtttacaaccttaagatcatcaatcctaaggaattagaagagaagatcaacgccatcgtcggcgtagtgactaacggtttgttcgcgaaacgcggcgccgatgtgttactggttggcacccctgaaggcgtgaaaacctttaccgcttaa

SEQ ID NO: 3275 - protein, 219 aa, Shewanella sp
MTQDEMKKAAGWAALKYVEKDSIVGVGTGSTVNHFIDALATMKADIEGAVSSSEASTQKMKALGIPVYDLNSVDKLSVYVDGADEINGHMDMIKGGGAALTREKIVAAVAEKFVCIVDNTKQVDILGEFPLPVEVIPMARSYVARELVKLGGDPVYREGVVTDNGNVILDVYNLKIINPKELEEKINAIVGVVTNGLFAKRGADVLLVGTPEGVKTFTA

SEQ ID NO: 3276 - DNA, 789 bp, Silicibacter pomeroyi
  CDS (1)..(789): transl_table=11
atgaccggagaactctcgcccatcgacaaggcgaaattcgttgccgccaaacgggcggccgatctggtcgaggacgggatgcgcgtgggtctgggcaccggctcgaccgccgcctggctggtgcgctgcctgggcgacatggtgcgcaaggaagggttgaagatgcgcggcgtgccgacctcgacccggaccgcgcaactggcgcgagaggtggggatcgaggtgatcacgctggatgaggcgcgttggctggatatcaccatcgacggggcagacgagttcgacggcgacctgaacctgatcaagggcggcggcggtgcgctgctgcaggaaaagatcgtggcgactgcctctgaccagatggtggtgatcgccgatctgggcaaggaggtcagccggctgggtgcttttcccctgccggttgaggtgatcccgttcggctggcagaccacccaggcgctgctggaggagacgctgatctcgatggatgtgctggggcggacggcgaccttgcggatgaatggcgacacgccgtttgtcaccgacgagggcaatcatatcctcgaccttcacctgcaacggatcggcaatgcccggcagttggcgctggtgctgaaccagatccccggcgtggtggaaaatggcctgttcatagatatctgtgataccgttgtggtgggccatggcgacgggcgggtggaaatccgcgatatcaaccagggcacggtcgaacatgaccggctcgattttgtcgaaagcgacaacctgtttaccgatctggcggattga

SEQ ID NO: 3277 - protein, 262 aa, Silicibacter pomeroyi
MTGELSPIDKAKFVAAKRAADLVEDGMRVGLGTGSTAAWLVRCLGDMVRKEGLKMRGVPTSTRTAQLAREVGIEVITLDEARWLDITIDGADEFDGDLNLIKGGGGALLQEKIVATASDQMVVIADLGKEVSRLGAFPLPVEVIPFGWQTTQALLEETLISMDVLGRTATLRMNGDTPFVTDEGNHILDLHLQRIGNARQLALVLNQIPGVVENGLFIDICDTVVVGHGDGRVEIRDINQGTVEHDRLDFVESDNLFTDLAD

SEQ ID NO: 3278 - DNA, 789 bp, Silicibacter sp
  CDS (1)..(789): transl_table=11
atgagcggcgatctatcccccatcgacaaggcgaaattcgtggctgccaaacgcgcggcagagctggtggaggacggcatgcgtgtcggactgggcaccgggtccaccgccgcgtggctggtgcggtgtcttggcgaaatggtgcgcgaggacgggctcaagatcaccggcgtgccgacctctgcccgtaccgccgagctggcgcgcgaggtcgggattgagctgatcaccctggatgaggcgcgctggctcgacctcacgattgacggtgcggatgaattcgacagcgaactcaatctcatcaagggcgggggaggcgcgctcttgcaggaaaagatcgtcgcgacggcctccgatcagatggtggtgatcgccgacaaggccaaggaagtggagacgctgggggccttcccgctgcccatcgaggtaatcccctttggctggcagacctcgcaggcgctggtggaagagacgctgatctcgatggatgtaatggggcgcagctcgacgttgcggatgaatggtgccagcccctatgtgaccgacgagggcaatcacatccttgatctgcatctcaaccggatcggcaatccgcgccagctggcgttggtgctgaaccagatccccggcgtggttgagaacgggctgttcatcgacatctgcgacacggtggtgatcggctatggcgatggcaaggtcgaggtgcgcgacatcaacgagggcactatcgagacggaccggatcgattttgtcgagaccgacaatctctttgcggatttgaacgactga

SEQ ID NO: 3279 - protein, 262 aa, Silicibacter sp
MSGDLSPIDKAKFVAAKRAAELVEDGMRVGLGTGSTAAWLVRCLGEMVREDGLKITGVPTSARTAELAREVGIELITLDEARWLDLTIDGADEFDSELNLIKGGGGALLQEKIVATASDQMVVIADKAKEVETLGAFPLPIEVIPFGWQTSQALVEETLISMDVMGRSSTLRMNGASPYVTDEGNHILDLHLNRIGNPRQLALVLNQIPGVVENGLFIDICDTVVIGYGDGKVEVRDINEGTIETDRIDFVETDNLFADLND

SEQ ID NO: 3280 - DNA, 687 bp, Sphingopyxis alaskensis
  CDS (1)..(687): transl_table=11
atgtccaacttcgtcgctgagaaatcgatcgcggcggtgagagcagtcgatgaggttcgcgatggcatgcttgtcgggttagggaccggaagcaccgccgcttatgccgtgaaaagcctcagcgagcgcatcaagcacggccttcgcatcaccgcggtcgccacatcccaagcgaccgaagctctagctctccgtcttgcggtgccgcttgttccctttcaacagcttagcgctgtcgacctgacgatcgacggcgccgatgaaatcgatgaccgcttccaagccatcaaagggggaggcggcgccctgcttcgcgagaaaatcaccgagtccgcatccacgcgcgtgatcatcatcgccgattccagcaagcttgttgcgcagctcggcaaattccctctgcccgtggaggtggttcctttcgccaccgagtttgttcgtgcacgcctgtccgcactcggagcccgtgttactgttcgcgaagcgggtgggacgcccttcctcacggaccagggcaattacatcctggacgcagctttggatgagataccaaggccgcgcgagatcgccgccgcgatcaccacaatcccgggcgtcctggagcatggactgttcttggatgaaatcgatacaatcatgattgcgcgcggtgacatggtggaggtgcgacaccggggtgaagcttga

SEQ ID NO: 3281 - protein, 228 aa, Sphingopyxis alaskensis
MSNFVAEKSIAAVRAVDEVRDGMLVGLGTGSTAAYAVKSLSERIKHGLRITAVATSQATEALALRLAVPLVPFQQLSAVDLTIDGADEIDDRFQAIKGGGGALLREKITESASTRVIIIADSSKLVAQLGKFPLPVEVVPFATEFVRARLSALGARVTVREAGGTPFLTDQGNYILDAALDEIPRPREIAAAITTIPGVLEHGLFLDEIDTIMIARGDMVEVRHRGEA

SEQ ID NO: 3282 - DNA, 687 bp, Staphylococcus aureus
  CDS (1)..(687): transl_table=11
atgaaagatgtcaaagcactcaagttaatgacattaaatgatgttttaagtcaaatcaatggtgacatgacgctgggaattggtacaggaagtacaatggaattactcttacctcaaatggcgcaactaattaaagaacgtggttacaatattacaggtgtatgcacttctaataaaattgcatttttagcaaaagaattaggtattaaaatatgtgaaatcaatgatgttgatcatatcgacttagcaattgatggtgctgatgaagtagatccatctttaaatataattaaaggtggcggtggtgcgctgttcagagagaaagttatagatgaaatggcatcgcgttttgttgtggttgtcgatgaaacgaaaatagttcaatacttaggtgagacgtttaagttaccagtagaggtggataaatttaactggtatcagatattacgtaaaattgaatcatacgctgatataaaagtagaacgtcgtgtaaacgaagatgtcgcatttataactgataatggcaattatattttagattgtaagttaccaaaaggaattgacccatataagttccatgagtatttaattcatctgacaggtgtgtttgagacaggatacttcttagatatggcagatcaagttattgtaggcactcaagagggtgttaaaattttagaaaaataa

SEQ ID NO: 3283 - protein, 228 aa, Staphylococcus aureus
MKDVKALKLMTLNDVLSQINGDMTLGIGTGSTMELLLPQMAQLIKERGYNITGVCTSNKIAFLAKELGIKICEINDVDHIDLAIDGADEVDPSLNIIKGGGGALFREKVIDEMASRFVVVVDETKIVQYLGETFKLPVEVDKFNWYQILRKIESYADIKVERRVNEDVAFITDNGNYILDCKLPKGIDPYKFHEYLIHLTGVFETGYFLDMADQVIVGTQEGVKILEK

SEQ ID NO: 3284 - DNA, 687 bp, Staphylococcus aureus
  CDS (1)..(687): transl_table=11
atgaaagatgtcaaagcactcaagttaatgacattaaatgatgttttaagtcaaatcaatggtgacatgacgctgggaattggtacaggaagtacaatggaattactcttacctcaaatggcgcaactaattaaagaacgtggttacaatattacaggtgtatgcacttctaataaaattgcatttttagcaaaagaattaggtattaaaatatgtgaaatcaatgatgttgatcatatcgacttagcaattgatggtgctgatgaagtagatccatctttaaatataattaaaggtggcggtggtgcgctgttcagagagaaagttatagatgaaatggcatcgcgttttgttgtggttgtcgatgaaacgaaaatagttcaatacttaggtgagacgtttaagttaccagtagaggtggataaatttaactggtatcacatattacgtaaaattgaatcatacgctgatataaaagtagaacgtcgtgtaaacgaagatgtcgcatttataactgataatggcaattatattttagattgtaagttaccaaaaggaattgacccatataagttccatgagtatttaattcatctgacaggtgtgtttgagacaggatacttcttagatatggcagatcaagttattgtaggcactcaagagggtgttaaaattttagaaaaataa

SEQ ID NO: 3285 - protein, 228 aa, Staphylococcus aureus
MKDVKALKLMTLNDVLSQINGDMTLGIGTGSTMELLLPQMAQLIKERGYNITGVCTSNKIAFLAKELGIKICEINDVDHIDLAIDGADEVDPSLNIIKGGGGALFREKVIDEMASRFVVVVDETKIVQYLGETFKLPVEVDKFNWYHILRKIESYADIKVERRVNEDVAFITDNGNYILDCKLPKGIDPYKFHEYLIHLTGVFETGYFLDMADQVIVGTQEGVKILEK

SEQ ID NO: 3286 - DNA, 687 bp, Staphylococcus aureus
  CDS (1)..(687): transl_table=11
atgaaagatgtcaaagcactcaagttaatgacattaaatgatgttttaagtcaaatcaatggtgacatgacgctgggaattggtacaggaagtacaatggaattactcttacctcaaatggcgcaactaattaaagaacgtggttacaatattacaggtgtatgcacttctaataaaattgcatttttagcaaaagaactaggtattaaaatatgcgaaatcaatgatgttgatcatatcgacttagcaattgatggtgctgatgaagtagatccatctttaaatataattaaaggtggtggtggtgcgctgttcagagagaaagtgatagatgaaatggcatcacgttttgttgtggttgtcgatgaaacgaaaatggttcaatacttaggtgagacgtttaagttaccagtagaggtggataaatttaactggtatcacatattacgtaaaattgaatcatacgctgatataaaagtagaacgccgtgtaaacgaagatgtcgcatttataactgataatggcaattatattttagattgtaagttaccaaaaggaattgacccatataagttccatgagtatttaattcatctgacaggtgtgtttgagacaggctacttcttagatatggcagatcaagttattgtaggtactcaagagggcgttaaaattttagaaaaataa

SEQ ID NO: 3287 - protein, 228 aa, Staphylococcus aureus
MKDVKALKLMTLNDVLSQINGDMTLGIGTGSTMELLLPQMAQLIKERGYNITGVCTSNKIAFLAKELGIKICEINDVDHIDLAIDGADEVDPSLNIIKGGGGALFREKVIDEMASRFVVVVDETKMVQYLGETFKLPVEVDKFNWYHILRKIESYADIKVERRVNEDVAFITDNGNYILDCKLPKGIDPYKFHEYLIHLTGVFETGYFLDMADQVIVGTQEGVKILEK

SEQ ID NO: 3288 - DNA, 693 bp, Staphylococcus epidermidis
  CDS (1)..(693): transl_table=11
atgaaagatgcaaaagagctaaaattgatgaccttagaagatgtacttagtcaaattgaaaatggtatgacaatcggaataggaacagggagcacaattgaattattaattccccaaattgctgaattaattcagcaaaagaattatacaattaccggcgtctgtacttctaataaaacagcatttttagctaaagaattagctatgaatatagttgatgtaaatgatgttgagaaaatcgacttagcaatagatggcgctgatgaagtagacagtgcgcttaaccttattaaaggcggtggtggagccttatttagggaaaaggtcatagatgaaatggctgaccgatttgtcgttgttgtagatgaaagtaaactcgtcaactatttaggagaaacatttgcattaccagttgaagtcgataaatttaattggtaccaagttgccaaaaaaattgagcgtacttatgatattcatgtaagcagaagagttaatgaagatgtaccgtttataaccgacaatggtaattacatattagattgttcattgcaaaatagaattcctgcttatgagctacacgaatttttaattcatttaactggcgttcttgaaacaggatatttcctcgatattgccgatcaagtaatagtaggaacacaagaaggcgtaaaaatattaaataaagaaacttag

SEQ ID NO: 3289 - protein, 230 aa, Staphylococcus epidermidis
MKDAKELKLMTLEDVLSQIENGMTIGIGTGSTIELLIPQIAELIQQKNYTITGVCTSNKTAFLAKELAMNIVDVNDVEKIDLAIDGADEVDSALNLIKGGGGALFREKVIDEMADRFVVVVDESKLVNYLGETFALPVEVDKFNWYQVAKKIERTYDIHVSRRVNEDVPFITDNGNYILDCSLQNRIPAYELHEFLIHLTGVLETGYFLDIADQVIVGTQEGVKILNKET

SEQ ID NO: 3290 - DNA, 672 bp, Streptococcus agalactiae serotype III
  CDS (1)..(672): transl_table=11
atggacgaactaaaaaaacttgctggagtgaccgctgcaaaatacgttaaaaacggtatgattgtaggtttagggacaggttctacagcatatttttttgttgaagaaattggacgccgtgtcaaagaagagggattgcaagtcgtaggcgttacaacgtcaaaccgtacgactgagcaggcaagaggattaggtattccgttgaaatcagcagatgatattgatgtcattgatgtcactgtggatggagcagatgaagtagaccctgattttaatggtatcaagggtggcggtggtgcgctgctcatggaaaaaatagtagctactccaactaaagaatatatctgggttgtcgatgagagcaaacttgttgaaacgttaggtgcatttaaattgcctgttgaggttgttagatatggttctgagcgtctttttcgggtttttaaatcaaaaggttattgtccttctttccgtgaaacagaaggtgaccgctttatcactgatatggggaactacattatcgacctagatttgaaaaaaatagaggatccaaagcagttagcgaatgaacttgaccatacagttggtgttgttgaacatggtttatttaatagtatggttaataaagttatagtagcaggcaaaaacggtcttgacatacttgaaaaataa

SEQ ID NO: 3291 - protein, 223 aa, Streptococcus agalactiae serotype III
MDELKKLAGVTAAKYVKNGMIVGLGTGSTAYFFVEEIGRRVKEEGLQVVGVTTSNRTTEQARGLGIPLKSADDIDVIDVTVDGADEVDPDFNGIKGGGGALLMEKIVATPTKEYIWVVDESKLVETLGAFKLPVEVVRYGSERLFRVFKSKGYCPSFRETEGDRFITDMGNYIIDLDLKKIEDPKQLANELDHTVGVVEHGLFNSMVNKVIVAGKNGLDILEK

SEQ ID NO: 3292 - DNA, 672 bp, Streptococcus agalactiae serotype V
  CDS (1)..(672): transl_table=11
atggacgaactaaaaaaacttgctggagtgaccgctgcaaaatacgttaaaaacggtatgattgtaggtttagggacaggttctacagcatatttttttgttgaagaaattggacgccgtgtcaaagaagagggattgcaagtcgtaggcgttacaacgtcaaaccgtacgactgagcaggcaagaggattaggtattccgttgaaatcagcagatgatattgatgtcattgatgtcactgtggatggagcagatgaagtagaccctgattttaatggtatcaagggtggcggtggtgcgctgctcatggaaaaaatagtagctactccaactaaagaatatatctgggttgtcgatgagagcaaacttgttgaaacgttaggtgcatttaaattgcctgttgaggttgttagatatggttctgagcgtctttttcgggtttttaaatcaaaaggttattgtccttctttccgtgaaacagaaggtgaccgctttatcactgatatggggaactacattatcgacctagatttgaaaaaaatagaggatccaaagcagttagcgaatgaacttgaccatacagttggtgttgttgaacatggtttatttaatggtatggttaataaagttatagtagcaggcaaaaacggtcttgacatacttgaaaaatag

SEQ ID NO: 3293 - protein, 223 aa, Streptococcus agalactiae serotype V
MDELKKLAGVTAAKYVKNGMIVGLGTGSTAYFFVEEIGRRVKEEGLQVVGVTTSNRTTEQARGLGIPLKSADDIDVIDVTVDGADEVDPDFNGIKGGGGALLMEKIVATPTKEYIWVVDESKLVETLGAFKLPVEVVRYGSERLFRVFKSKGYCPSFRETEGDRFITDMGNYIIDLDLKKIEDPKQLANELDHTVGVVEHGLFNGMVNKVIVAGKNGLDILEK

SEQ ID NO: 3294 - DNA, 678 bp, Streptococcus gordonii
  CDS (1)..(678): transl_table=11
atggagaatctaaagaagatggcagggattaaggctgctgagttcgtgacagatggtatggtagttggacttggaacaggttcgaccgcttattattttgttgaagaaattggccgtcgtataaaagaagaaggcctgcaaattattgcagtaacaacttcaagtgtaaccagccagcaagcagaaggtttgggaattccactcaaatccattgatgaagttgatttagttgatgtgacagttgatggggcagatgaggttgatccaaactttaatggtattaaaggtggtgggggcgctctccttatggagaaggttgttgcaacaccgacaaaaagctacatttgggtagttgatgagagtaaattagttgagaagctaggagcttttaagcttccggtcgaagttgtccagtatggtgcagagcaagttttccgtcgctttgaacgtgcaggttacaaaccagcctttcgtcagaaagatggtcaacgctttgttacagatatgaagaattttatcattgacctagatttgggtgtgattgaaaaccctattgagtttgcccgtgaattagaccatattgttggtatagttgagcacggtctctttaaccaaatggtagataaggttattgtagcaggaaaagctggtgttcaagttttagaagctaataaataa

SEQ ID NO: 3295 - protein, 225 aa, Streptococcus gordonii
MENLKKMAGIKAAEFVTDGMVVGLGTGSTAYYFVEEIGRRIKEEGLQIIAVTTSSVTSQQAEGLGIPLKSIDEVDLVDVTVDGADEVDPNFNGIKGGGGALLMEKVVATPTKSYIWVVDESKLVEKLGAFKLPVEVVQYGAEQVFRRFERAGYKPAFRQKDGQRFVTDMKNFIIDLDLGVIENPIEFARELDHIVGIVEHGLFNQMVDKVIVAGKAGVQVLEANK

SEQ ID NO: 3296 - DNA, 678 bp, Streptococcus mutans
  CDS (1)..(678): transl_table=11
atggaagaacttaaaaagattgctggtgttagggcagctcaatatgttgaagatggtatgattgtgggacttgggacaggttcaacagcctattattttgttgaagaagtcggtcgccgtgtgcaagaagagggcttgcaagtgattggtgtgacgacgtcaagtcggacaactgctcaagctcaagctttaggtattcctctcaaatctattgatgaggttgactctgttgatgtgacagtggatggagctgatgaggttgatcctaatttcaatggtattaaaggcggcggtggtgctctgctgatggaaaagatagtaggaacattgacaaaagactatatctgggtggttgatgaaagcaagatggttgatactttgggagcctttaggttacccgttgaagtagttcaatatggtgctgagcgtctttttcgagagtttgagaaaaaaggctataaaccttcttttcgcgaatatgatggtgttcgctttgtgactgacatgaaaaactttatcattgatttggatttgggctctatccctgatcctattgcttttggcaatatgttagatcatcaagtcggtgttgttgaacacggcctcttcaatggtatggttaatcgtgtgattgttgcaggtaaagatggtgttcgtattttggaagctaataaataa

SEQ ID NO: 3297 - protein, 225 aa, Streptococcus mutans
MEELKKIAGVRAAQYVEDGMIVGLGTGSTAYYFVEEVGRRVQEEGLQVIGVTTSSRTTAQAQALGIPLKSIDEVDSVDVTVDGADEVDPNFNGIKGGGGALLMEKIVGTLTKDYIWVVDESKMVDTLGAFRLPVEVVQYGAERLFREFEKKGYKPSFREYDGVRFVTDMKNFIIDLDLGSIPDPIAFGNMLDHQVGVVEHGLFNGMVNRVIVAGKDGVRILEANK

SEQ ID NO: 3298 - DNA, 684 bp, Streptococcus pneumoniae
  CDS (1)..(684): transl_table=11
gtggaaaatctgaagaaaatggcaggtatcacggctgctgaatttatcaaggatgggatggttgtagggctaggaacaggttctactgcctattattttgtcgaagaaatcggtcgtcgaatcaaggaagaaggcttgcagattacagctgtgacgacttctagtgtgaccagtaaacaggctgaagggctcaatatcccgctcaagtctattgaccaagtagactttgtcgatgtgacagtcgacggggcggatgaagtggatagtcagtttaatggaatcaaaggcggtggtggtgcccttctcatggaaaaggtggtcgcaacaccatcaaaagaatacatttgggtggtggatgaaagcaagctggtcgaaaaactaggtgcttttaaattgccagtagaagtggttcagtatggtgcagagcaggtctttcgtcattttgaacgagctggctacaaaccaagtttccgtgaaaaagacggccaacgttttgtgaccgatatgcagaattttatcattgacctcgccttggatgtcattgaaaatccaattgcttttggacaagaattggaccatgtcgttggtgttgtggagcatggtttattcaaccaaatggtggataaggtaatcgttgctggacgagatggagttcagatttcaacttcaaaaaaaggaaaatag

SEQ ID NO: 3299 - protein, 227 aa, Streptococcus pneumoniae
MENLKKMAGITAAEFIKDGMVVGLGTGSTAYYFVEEIGRRIKEEGLQITAVTTSSVTSKQAEGLNIPLKSIDQVDFVDVTVDGADEVDSQFNGIKGGGGALLMEKVVATPSKEYIWVVDESKLVEKLGAFKLPVEVVQYGAEQVFRHFERAGYKPSFREKDGQRFVTDMQNFIIDLALDVIENPIAFGQELDHVVGVVEHGLFNQMVDKVIVAGRDGVQISTSKKGK

SEQ ID NO: 3300 - DNA, 711 bp, Synechococcus elongatus
  CDS (1)..(711): transl_table=11
atgagtgatgatgcagtgaagcaaatgaagcaggtcgttgccaaagctgctgccgatcgcgtgcaatcaggaatggtggtgggcttgggcactggctccacaacggcctttgttattcagtttttgggcgatcgcctgcgcaagggcgaactgagcaatattgtcggtgtacccacctcatttcaagcctctgtccttgctaaaaagtacggcattcccttggtgaccctcgatgatgtggagaaactagacattgccattgatggtgctgatgaagtggaccccgccaaaaacctgatcaaagggggtggggctgcccatacccgtgaaaaaattgttgattccctagccgagcagttcttggtggtggtagacagcagcaaactggtgcagaaattgggctccaccttccctgtacctgtggaggtcttaccctttgccgtggcgccggtgactcgtgccctgaaagcgctggggggtgagcccgaactgcgcatgggcgtgaaaaaagatggcccagtggtgactgaccaaggcaacttcgtcctggatgtcagatttgatgatattcctgaccccgccgaactggagaaagcaattaacaacattcccggcgttgtcgaaaatgggctctttgtcaacgtcgccgacgtaattctcgttggggaaattgtggatggtcaaccccaggttcgggaaattttccactag

SEQ ID NO: 3301 - protein, 236 aa, Synechococcus elongatus
MSDDAVKQMKQVVAKAAADRVQSGMVVGLGTGSTTAFVIQFLGDRLRKGELSNIVGVPTSFQASVLAKKYGIPLVTLDDVEKLDIAIDGADEVDPAKNLIKGGGAAHTREKIVDSLAEQFLVVVDSSKLVQKLGSTFPVPVEVLPFAVAPVTRALKALGGEPELRMGVKKDGPVVTDQGNFVLDVRFDDIPDPAELEKAINNIPGVVENGLFVNVADVILVGEIVDGQPQVREIFH

SEQ ID NO: 3302 - DNA, 717 bp, Synechococcus sp
  CDS (1)..(717): transl_table=11
atgtcggatcttcaaaaccagatgaagcaggccgttgctgatgcggctgtgcagcagttccgcgacggcatggtggttggtttggggtcaggctccacggcggcgctgatgatcaagggtttgggtgaacgccttgctgctggtcagctgagcgacatcgttggggtgaccacgtcgttccaaggcgaggttctcgctgcagagttgggaattcccctgcgcagtctcaacgccgtggaccggattgatctggcgatcgatggtgccgatgaagtggaccctgcgttccaattgatcaagggaggtggcgcttgccacgtgcaagagaagcttgttgcagcccgcgcagaccgtttcatcgtggtggtcgattccaccaagcttgtggagcgcctgaacctcgggtttttgcttcctgttgaggttctgcctggagcctgggttcagatcagccagcaactgaaagcgatgggcggtgacgccgaactgcgcatggccacgcgcaaggcgggtccggtggtgaccgatcagggcaatctggttctggatgtgcgatttgaaggcggtatcgctgaccccgcgtcgctcgagaaagagatcaacaacattcccggagtgcttgaaaacggccttttcgtcaatctggccgacgaggtgctggtcggccagatcgatggtggtgttgccagcgcgcgcagcctcgagaaggccggttga

SEQ ID NO: 3303 - protein, 238 aa, Synechococcus sp
MSDLQNQMKQAVADAAVQQFRDGMVVGLGSGSTAALMIKGLGERLAAGQLSDIVGVTTSFQGEVLAAELGIPLRSLNAVDRIDLAIDGADEVDPAFQLIKGGGACHVQEKLVAARADRFIVVVDSTKLVERLNLGFLLPVEVLPGAWVQISQQLKAMGGDAELRMATRKAGPVVTDQGNLVLDVRFEGGIADPASLEKEINNIPGVLENGLFVNLADEVLVGQIDGGVASARSLEKAG

SEQ ID NO: 3304 - DNA, 720 bp, Synechococcus sp
  CDS (1)..(720): transl_table=11
atggccgatctccagacccagatgaagcaagcggtggccgatgccgccgtcgagcagatcaaggacggcatggttctgggtctcgggtccggttccacggctgccctaatgatcaaagccctcggggcaaagctggccagtggtgagctgaaggacatcgttggtgtcaccacctccttccaaggtgaggttcttgccgctgagctcaacattcctctgctcagcctcaatgcggtggatcgcatcgatttggccattgatggcgccgatgaagtggatccaggctttcaactgatcaaaggcggcggtgcctgtcacgttcaggagaagctggtggcggctcgcgccgatcggttcgttgtggtggtggattccaccaagctcgtggagcggttgaacctgggatttctgttgccggtggaagtattacccggtgcctggcgtcaggttcagcagcagctggcagctctcggcggcaaagccgaactgcgcatggcccagcgcaaagctggtccggtggtgaccgatcagggcaatctcgttctcgatgtgacgatgaacggagggatttccgatccggcggcactggaatcaacggtgaacaacattcccggtgttctggagaacggcctgttcgttgatctcgttgatgaggtgctggttggtgagatcaccgatgggtctgcgggggttcgcagcctggagaagcggctcagctga

SEQ ID NO: 3305 - protein, 239 aa, Synechococcus sp
MADLQTQMKQAVADAAVEQIKDGMVLGLGSGSTAALMIKALGAKLASGELKDIVGVTTSFQGEVLAAELNIPLLSLNAVDRIDLAIDGADEVDPGFQLIKGGGACHVQEKLVAARADRFVVVVDSTKLVERLNLGFLLPVEVLPGAWRQVQQQLAALGGKAELRMAQRKAGPVVTDQGNLVLDVTMNGGISDPAALESTVNNIPGVLENGLFVDLVDEVLVGEITDGSAGVRSLEKRLS

SEQ ID NO: 3306 - DNA, 717 bp, Synechococcus sp
  CDS (1)..(717): transl_table=11
atgtcggatctccaaactcaaatgaagcaagccgtcgcggaggcggctgttgcacagattcgtgatggcatggtggtgggcctcggttctgggtctactgccgctttgatgattgaaggcctcggggcccgactggcagcaggtcagcttcgtgacattgtcggcgtgaccacgtcgtttcaaggagaggtgcttgccgctgagttggggattcctttgcgtgctttgaacgccactgatcgcatcgatttagcgattgatggtgctgatgaagtggatccttcctttcaattgatcaaaggtggtggtgcctgccacgtccaagaaaagcttgttgctgaccgagcagaacgtttcattgtcgtggttgattccacgaagcttgttcggtgtttaaatctcgatttcttactaccagttgaagtgctcccaggagcatgggtgcaagttcaatccaggctcaaatcaatgggaggagttgcagaactgcggatggcaacccgtaaagctggcccggtggtgaccgaccagggcaaccttgttctagatgtgcgatttgagaatggaatctctgatccgattgccctcgagcgtgacatcaacaatcttccaggcgttttggagaacggcctcttcgtcaaccttgctgacgaagttctcgttggtgaaatcaaggatggcgttgctggagtccgcagcctggatcgtgtgggttaa

SEQ ID NO: 3307 - protein, 238 aa, Synechococcus sp
MSDLQTQMKQAVAEAAVAQIRDGMVVGLGSGSTAALMIEGLGARLAAGQLRDIVGVTTSFQGEVLAAELGIPLRALNATDRIDLAIDGADEVDPSFQLIKGGGACHVQEKLVADRAERFIVVVDSTKLVRCLNLDFLLPVEVLPGAWVQVQSRLKSMGGVAELRMATRKAGPVVTDQGNLVLDVRFENGISDPIALERDINNLPGVLENGLFVNLADEVLVGEIKDGVAGVRSLDRVG

SEQ ID NO: 3308 - DNA, 720 bp, Synechococcus sp
  CDS (1)..(720): transl_table=11
atggctgatctacagacccagatgaagcaggcggtggctgatgccgccgtggaacagatcaaggacggcatggttctgggcctggggtcaggctccaccgccgccctgatgattcagggcctgggggccaagctcgccagcggagaactcaaagacatcgtcggtgttaccacctctttccagggagaggtgctggccgctgagctcaacatccccctgctcagcctcaacgccgtcagccggattgatctggccatcgatggtgctgacgaagtcgaccctggcttccaattgatcaagggcggtggcgcttgccacgtgcaggaaaaactcgtggcggcacgggcggatcgttttgtagtggtggtggactccaccaaactggtggaccgtctcaacctcggttttctgctgccggtggaagtgctacccggggcctggcgccaggtgaagcagcagctggaagctctcgggggcagtgctgagctccgaatggcccagcgcaaggcaggccctgtggtcaccgatcagggcaacctggtgctggacgccaagctcgatggcggcatcagcgatccagtggccctggagcagacgatcaacaacattccaggtgtgctggagaacggcctgttcgtcaacatcaccgatgaggtgttggtcggtgaaatcactgatggcgttgcgggtgtccgcagtctgcagaagcgcctcagctga

SEQ ID NO: 3309 - protein, 239 aa, Synechococcus sp
MADLQTQMKQAVADAAVEQIKDGMVLGLGSGSTAALMIQGLGAKLASGELKDIVGVTTSFQGEVLAAELNIPLLSLNAVSRIDLAIDGADEVDPGFQLIKGGGACHVQEKLVAARADRFVVVVDSTKLVDRLNLGFLLPVEVLPGAWRQVKQQLEALGGSAELRMAQRKAGPVVTDQGNLVLDAKLDGGISDPVALEQTINNIPGVLENGLFVNITDEVLVGEITDGVAGVRSLQKRLS

SEQ ID NO: 3310 - DNA, 708 bp, Synechocystis sp
  CDS (1)..(708): transl_table=11
atggctgagctagatgcggccaacttaatgaaacaggcagtgggtaaagccgccgctgaccgagttaaatccaacaccattgttggtttgggtaccggttccaccaccgcctacgccctggaattcattggcgatcgcctgaaaaaaggagaattggaaaatgtagtgggcattcccacttcctttcaggcggaagtattggcccgtaaatatggcattcccctaaccacgttggatgtggcggatcgcattgacattgccatcgatggagcggacgaagttgacccccagaaaaatttgatcaaagggggaggggccgcccacaccagggaaaaaattgttgacgccttggcggaaacttttctggtggtggtagacagtggcaaattggtggataaattgggttccacttttttactgccggtggaagtgattcccatggccctaactcctgtaatgcgagctttagctaaattaggtggtaaaccagaactacgcatgggggtgaaaaaagctggccccgttgtcactgaccaaggtaacctcgtcattgacgttaaatttgatgccattaccaacccagcggagttggaaaaaaccattaacaatctccccggtgtgttagaaaacggcctatttgtgggggtagcggacgtaattttggtaggggaaattattgacggccaacccacggtgcgggaattctag

SEQ ID NO: 3311 - protein, 235 aa, Synechocystis sp
MAELDAANLMKQAVGKAAADRVKSNTIVGLGTGSTTAYALEFIGDRLKKGELENVVGIPTSFQAEVLARKYGIPLTTLDVADRIDIAIDGADEVDPQKNLIKGGGAAHTREKIVDALAETFLVVVDSGKLVDKLGSTFLLPVEVIPMALTPVMRALAKLGGKPELRMGVKKAGPVVTDQGNLVIDVKFDAITNPAELEKTINNLPGVLENGLFVGVADVILVGEIIDGQPTVREF

SEQ ID NO: 3312 - DNA, 726 bp, Thermoplasma acidophilum
  CDS (1)..(726): transl_table=11
atggctgattatgaaaagcagaagatgaatgccgcaatcaaggctgctgaatatgtccgcagcggcatgatcgttgggcttggaactggcaccacctcgtactatctgataaatgaaataggaaggcgtgtcagggaagagggactgaaaatacgtgcagtatgcacctccagaaggaccgaggatcttgcgaaacagaacggcatcgaggtcattcagggcacgaaggatcagatagatctaaccatagatggcgcggatcaggtaggcatgtacggaacgctcatcaagggcggaggcggtgcacttcttcgggaaaagatagttgcctacaacagcaaggaaatgtacgttatcgtggacagcaggaagatagaagctgctcactttggaagctttccgctgcccgttgaaatagtgccctttatgcatatgagaacccttgagaatctcagagggatatgcacacagacagatctgaggatgaacgagaaaggcgaacctttcgttacggacaatggaaattacattgcagacatgcacatgggaatgatcgacgatcccatcaatcttgaaagatctctcaagtcaatacctggtgtggttgaggttggcttgttcaacggtatagcgaagaggatctttgaaggcacagacgaaggctgcaacatatacagtataacgaacagcggtatcaaaaaagaggaggtctattttgacccctga

SEQ ID NO: 3313 - protein, 241 aa, Thermoplasma acidophilum
MADYEKQKMNAAIKAAEYVRSGMIVGLGTGTTSYYLINEIGRRVREEGLKIRAVCTSRRTEDLAKQNGIEVIQGTKDQIDLTIDGADQVGMYGTLIKGGGGALLREKIVAYNSKEMYVIVDSRKIEAAHFGSFPLPVEIVPFMHMRTLENLRGICTQTDLRMNEKGEPFVTDNGNYIADMHMGMIDDPINLERSLKSIPGVVEVGLFNGIAKRIFEGTDEGCNIYSITNSGIKKEEVYFDP

SEQ ID NO: 3314 - DNA, 684 bp, Thermus thermophilus
  CDS (1)..(684): transl_table=11
atggagcgccccttggagagctacaagaaggaggcggcccacgccgccatcgcctacgtccaggacgggatggtggtgggcctgggcacgggctccacggcccgctacgccgtcctcgagctcgcccggcgccttcgggagggggagctgaagggcgtggtgggggtgcccacctcgagggccaccgaggagctcgccaagcgggagggcatccccctcgtggaccttccccctgagggggtggacctggccatagacggggcggacgagatcgccccgggccttgccctcatcaagggcatgggcggggccctcctccgggagaagatcgtggagcgcgcggccaaggagttcatcgtcatcgccgaccacaccaagaaggtgcccgtcctcggccggggcccggtgccggtggagatcgtccccttcggctaccgggcgaccctcaaggccatcgccgacctcgggggggagcccgagctccgcatggacggggacgagttctacttcaccgacggcggccacctcatcgccgactgccgcttcggccccatcggggaccccttgggcttgcaccgggccctcttggagatccccggggtggtggagacggggctcttcgtggggatggccacccgggccctggtggcggggccttttggggtggaggagcttctgccgtag

SEQ ID NO: 3315 - protein, 227 aa, Thermus thermophilus
MERPLESYKKEAAHAAIAYVQDGMVVGLGTGSTARYAVLELARRLREGELKGVVGVPTSRATEELAKREGIPLVDLPPEGVDLAIDGADEIAPGLALIKGMGGALLREKIVERAAKEFIVIADHTKKVPVLGRGPVPVEIVPFGYRATLKAIADLGGEPELRMDGDEFYFTDGGHLIADCRFGPIGDPLGLHRALLEIPGVVETGLFVGMATRALVAGPFGVEELLP

SEQ ID NO: 3316 - DNA, 726 bp, Thermoplasma volcanium
  CDS (1)..(726): transl_table=11
atgccagattatgagaagcagaaaagaaacgctgctgttgaagccgcatcctatgtgaaaacagggatggttataggtatcggcacagggacaacggcccgctatttaattgaggaactaggtagaagagtttctgaagagaatttaaaaataaagggtgtttgtacatctaagaaatctgaagaactcgcaagagctgccggtatagaaatatctgaaaacccagaacagattatagatttaacaatcgatggtgcggatcaggttaatctccatggaacactcataaaaggcggtggaggtgctcttctgagggaaaagatagtcgcatacaacagcaaagagatgtacgttatagttgatagtagaaaaatagatgacgaaaacttcggcagctttcctctaccagtggaagttgtccctttccttcacaggatgacgctagagaatctcaggaagatatgcccatccaccgatctaagaaaaaacagcgatgggacgctcttcataacagacaatgggaactatatagctgatatgaaattcggaaggataagggaaactaatgagcttgaaaaaaagatcaaaagtatcccaggagttgtagatgttggcctcttcaataacatagcggataagatatttgaaggtaacgatgacggctgtaatatatacgtcgtttccgagaagggaagaatagaaaaagagaaaggccaattcaaataa

SEQ ID NO: 3317 - protein, 241 aa, Thermoplasma volcanium
MPDYEKQKRNAAVEAASYVKTGMVIGIGTGTTARYLIEELGRRVSEENLKIKGVCTSKKSEELARAAGIEISENPEQIIDLTIDGADQVNLHGTLIKGGGGALLREKIVAYNSKEMYVIVDSRKIDDENFGSFPLPVEVVPFLHRMTLENLRKICPSTDLRKNSDGTLFITDNGNYIADMKFGRIRETNELEKKIKSIPGVVDVGLFNNIADKIFEGNDDGCNIYVVSEKGRIEKEKGQFK

SEQ ID NO: 3318 - DNA, 657 bp, Thiobacillus denitrificans
  CDS (1)..(657): transl_table=11
atgacccaagacgaaatgaagcgagccgtagcgcgtgctgcggtggattatgccaagggcggcatcatcggcgtaggaaccggctcgaccgcgaaccatttcatcgacgccctggccgaagtcaaggggcgcatcgagggcacggtggcgagttccgaggcgacggcggcgcggctgaaaagccacggcatacaggtgctcgacctcaacagcgtcggagagctcgaggtctacgtcgatggggctgacgagatcacgcagcatttcgcgatgatcaagggcggcggcggcgcgctgacgcgggaaaagatcgttgcggcgtgcagcaagcaattcgtctgtatcgccgacgacagcaagctcgtcgacgttctcggcaaattcccgctgccggtcgaggtgatcccgatggcccgctcgcacgtcgcgcgggagctcgtgaagctcggcggccagccccgcctgcgcgagggcttcacgaccgacaacggcaacgtgatcctcgacgtgcacaacctttcgatcatcgacccggtatcgctcgagaccgcgatcaaccagatcgtcggcgtggtcaccaacggcctcttcgcccggcgcggcgccgacgtgctgttgctcggcacgtcgaccggggtcaagaccttcacgagatag

SEQ ID NO: 3319 - protein, 218 aa, Thiobacillus denitrificans
MTQDEMKRAVARAAVDYAKGGIIGVGTGSTANHFIDALAEVKGRIEGTVASSEATAARLKSHGIQVLDLNSVGELEVYVDGADEITQHFAMIKGGGGALTREKIVAACSKQFVCIADDSKLVDVLGKFPLPVEVIPMARSHVARELVKLGGQPRLREGFTTDNGNVILDVHNLSIIDPVSLETAINQIVGVVTNGLFARRGADVLLLGTSTGVKTFTR

SEQ ID NO: 3320 - DNA, 720 bp, Treponema denticola
  CDS (1)..(720): transl_table=11
atggacacgtcacagttaaaagaaagagttgcctatcatgcaatagacactcttttttcggaaggaaaaatttttgacggaatgaagataggactcggcacaggctctacagctatgccggctgtacaccgtctcgcccaattattgtcgtcaggtaagttaaaaaaaatatacgccgtacctacaagttttcaaacatcaatcgaatgtgaaaaactaggcatccctatttattctttaagttctcagcaaataggaggaagcttagaccttgctatagacggagcagacgaaatcgaccccgataaaaacctaatcaagggaggcggagctgccctcctcaaagaaaaaataatagcatataattcaaaagaatttgttgtcattgccgatgaaagaaaaaaagttaaatctatgggaaaaggatttgcccttccgatagaaattataccggaagcacgtttaagtattacaaaggctcttgaagcccaaggcatagaagtatttctgcgtgagggcgtaaaaaaaatgggacctgttgttaccgacaacggaaactttataattgatgtaaaatggcctaaagcagccgatgtagatcccaaagccttggaagaaagtttaaacaagattacaggtgtagtagaaaacggtttttttacaaaaaacactccaagagtatttatcgtacaccaagatggaaatatagaagatttataa

SEQ ID NO: 3321 - protein, 239 aa, Treponema denticola
MDTSQLKERVAYHAIDTLFSEGKIFDGMKIGLGTGSTAMPAVHRLAQLLSSGKLKKIYAVPTSFQTSIECEKLGIPIYSLSSQQIGGSLDLAIDGADEIDPDKNLIKGGGAALLKEKIIAYNSKEFVVIADERKKVKSMGKGFALPIEIIPEARLSITKALEAQGIEVFLREGVKKMGPVVTDNGNFIIDVKWPKAADVDPKALEESLNKITGVVENGFFTKNTPRVFIVHQDGNIEDL

SEQ ID NO: 3322 - DNA, 765 bp, Treponema pallidum
  CDS (1)..(765): transl_table=11
atgcacgagaggaacacgacgacgaacaccccattagacgttaccgcgcagaaattgctggttgcccagcgcagcgtggacaccctcgttcaagagggggtgctgcacgcgcacatgagtattggccttgggacgggctctacggcaatgcctgcggtaaaacgcatcgcagatcaccttgcacgcggcactctctctgacatagcggcagtgcccactagttttcaaacagcgctcatatgtgagcggtacaacatcccccttttttctctcagttcaaaacggattgggggcaaactggatgtgactatcgacggcgcggatgaaattgacacccaaaattttgtcatcaaaggcggtggagctgcgcttttgcaagaaaagatcgctgcatacaacagcgcgcactttgttatcatcgtagacgaaacaaaggtggtagaaaccttaggtacgcgcgcagcgctccctatcgaagtggtgcctgaggcccgcatgagcgtgatgcgcacgcttcaggattgggggttgtccgtgcacatacgcgaagcggtaagaaaaaaaggaccggtagtgactgaccacggaaattttattttagacgcgcggtggcaatcgctcccgacgcgcaccccgcaagacatggaacgcgcgctcaatgcactgccgggggtcattgaaaatggcttgttcaccgagcgaaccgtacgcgtctttgttgcgcacgcagacggttcggtagaggagcgctcggcctccttctaa

SEQ ID NO: 3323 - protein, 254 aa, Treponema pallidum
MHERNTTTNTPLDVTAQKLLVAQRSVDTLVQEGVLHAHMSIGLGTGSTAMPAVKRIADHLARGTLSDIAAVPTSFQTALICERYNIPLFSLSSKRIGGKLDVTIDGADEIDTQNFVIKGGGAALLQEKIAAYNSAHFVIIVDETKVVETLGTRAALPIEVVPEARMSVMRTLQDWGLSVHIREAVRKKGPVVTDHGNFILDARWQSLPTRTPQDMERALNALPGVIENGLFTERTVRVFVAHADGSVEERSASF

SEQ ID NO: 3324 - DNA, 861 bp, Ustilago maydis
  CDS (1)..(861)
atggcttcttccaacgctaccaacagtaccagtgccgccagtgctgccaacaccaactcgtctgctttcaagagtgccgaattggctgctttgagcggcgtcgaggctgctaagcgtgctgctgcgtacgctgccgttgacaaccacgtcaagccgcagcacgagatcattggtattggctcgggctcaacggtgccttatgttgttgagcgaattgctcaacagggacctgctgtgaatgcaaagcgttggttcgttcccaccggcttccagtcacgcgaactcatcatcaacgccggccttcgtctcggtgatgtggatagcttccccagcatcgacgtcactatcgatggcgctgacgaggtcgacaatgcgctcaactgcatcaagggcggcggtgcttgtcatttgcgcgaaaaggtactcgccgaagccgccaatgaatttgtcgtagtcgctgactaccgcaagaatggatcgcagctcggcacaaagtggctgcaaggtgtccccatcgaggtcgctccgtttgcctatgcaaaagtgcttcagaacctcaaaaagatgggttctgacaaggcggtccttcgcatgggcaaggcaaaagccggtcccgtcgttacagataatggcaacttttgcatcgatgctcccttccccgaagcacagatgaaggatccctctgatttgctcaagcgtatcaagttgctcaccggtgtacttgaggtcggtctgttttgcaacatttgcaagtccgcctactttggcaacgatgacggcaccatcaccatcaaaaccgccgccggagatgtgcaagagggcgtccactttgacgtctccaaggcgcctgcaacagcataa

SEQ ID NO: 3325 - protein, 286 aa, Ustilago maydis
MASSNATNSTSAASAANTNSSAFKSAELAALSGVEAAKRAAAYAAVDNHVKPQHEIIGIGSGSTVPYVVERIAQQGPAVNAKRWFVPTGFQSRELIINAGLRLGDVDSFPSIDVTIDGADEVDNALNCIKGGGACHLREKVLAEAANEFVVVADYRKNGSQLGTKWLQGVPIEVAPFAYAKVLQNLKKMGSDKAVLRMGKAKAGPVVTDNGNFCIDAPFPEAQMKDPSDLLKRIKLLTGVLEVGLFCNICKSAYFGNDDGTITIKTAAGDVQEGVHFDVSKAPATA

SEQ ID NO: 3326 - DNA, 657 bp, Vibrio parahaemolyticus
  CDS (1)..(657): transl_table=11
atgactcaagatgaaatgaaaaaagcggctggttgggcagcacttaaatatgttgagaaaggcagcattgtcggtgttggcacaggctctaccgtgaatcacttcatcgatgcactaggcactatcaaagatgatatcaaaggtgcagtgtctagctcagttgcttctacagagcgtctaaaagagcttggtattgaagtttttgagtgcaacgacgtaattaagctagacgtatatgttgatggcgcagacgaaatcaaccatgcgcgtgaaatgatcaaaggtggcggtgcagcgctaactcgtgaaaaaatcgttgcagcaatctctgaaaagtttgtatgtatcgttgacgacacgaaagcggttgacgtgcttggccagttccctcttccagtggaagtgattccaatggcacgttcttacgttgctcgtgagttggtgaaacttggtggcgaccctgcataccgtgaaggtgttgtaacggataacggcaacatcatcctagatgtacacaacatgcaaatcaccaacccgaaagagatggaagacaaaatcaacggtatcgcgggtgtggtaacggttggtctttttgctcaccgtggtgctgatgttgtgatcactggtacgccagaaggcgcaaaaattgaagagtaa

SEQ ID NO: 3327 - protein, 218 aa, Vibrio parahaemolyticus
MTQDEMKKAAGWAALKYVEKGSIVGVGTGSTVNHFIDALGTIKDDIKGAVSSSVASTERLKELGIEVFECNDVIKLDVYVDGADEINHAREMIKGGGAALTREKIVAAISEKFVCIVDDTKAVDVLGQFPLPVEVIPMARSYVARELVKLGGDPAYREGVVTDNGNIILDVHNMQITNPKEMEDKINGIAGVVTVGLFAHRGADVVITGTPEGAKIEE

SEQ ID NO: 3328 - DNA, 663 bp, Vibrio vulnificus; identical to SEQ ID NO: 2848
  CDS (7)..(663): transl_table=11

SEQ ID NO: 3329 - protein, 218 aa, Vibrio vulnificus
MTQDEMKKAAGWAALKYVEKGSIVGVGTGSTVNHFIDALGTMSEEIKGAVSSSVASTEKLEALGIKIFDCNEVASLDIYVDGADEINADREMIKGGGAALTREKIVAAIADKFICIVDGTKAVDVLGTFPLPVEVIPMARSYVARQLVKLGGDPCYREGVITDNGNVILDVYGMKITNPKQLEDQINGIPGVVTVGLFAHRGADVVITGTPEGAKIEE

SEQ ID NO: 3330 - DNA, 663 bp, Vibrio vulnificus; identical to SEQ ID NO: 2852
  CDS (7)..(663): transl_table=11

SEQ ID NO: 3331 - protein, 218 aa, Vibrio vulnificus
MTQDEMKKAAGWAALKYVEKGSIVGVGTGSTVNHFIDALGTMSEEIKGAVSSSVASTEKLEALGIKIFDCNEVASLDIYVDGADEINADREMIKGGGAALTREKIVAAIADKFICIVDGTKAVDVLGTFPLPVEVIPMARSYVARQLVKLGGDPCYREGVITDNGNVILDVYGMKITNPKQLEDQINAIPGVVTVGLFAHRGADVVITGTPEGAKIEE

SEQ ID NO: 3332 - DNA, 657 bp, Wigglesworthia glossinidia brevipalpis
  CDS (1)..(657): transl_table=11
gtgatagaagaaaaattaaaaaaacaagctgcatgggctgcaatcaaatacattaaaccaggagatatagttggagtaggtagcggttccacagcggaatattttattgatgcgttaggatcaattaaaaacctaataaaaggtactgtatcaagttcaagaatatcttcttctaaattaaaagatttaaatattcctttatttgacttaaatgaagtaagtttattaaatatatatgtagatggagcagacgaaataaatcaaaaaaaacatatgataaaaggcaaaggggcagctttgacaagagaaaaaattattgcatctgcagcaaaaaaatttatttgtatagtagatagtagcaaattcgtacatgttttaggaagagctcctttgccaatagaagttatacctatggctagaactttagtatctaaaaaaattattgatattggaggatctccgaaatataggaaaggaataattacagaaaatggaaatgttttattagacgtacataatttaattatacttgattctttatttttagaagaaaaaattaacaatataccgggggttgtatcagtaggtctttttgctcatagagcggcagacattgctattatttcaggaaaaaatggaataaaaataatagattaa

SEQ ID NO: 3333 - protein, 218 aa, Wigglesworthia glossinidia brevipalpis
MIEEKLKKQAAWAAIKYIKPGDIVGVGSGSTAEYFIDALGSIKNLIKGTVSSSRISSSKLKDLNIPLFDLNEVSLLNIYVDGADEINQKKHMIKGKGAALTREKIIASAAKKFICIVDSSKFVHVLGRAPLPIEVIPMARTLVSKKIIDIGGSPKYRKGIITENGNVLLDVHNLIILDSLFLEEKINNIPGVVSVGLFAHRAADIAIISGKNGIKIID

SEQ ID NO: 3334 - DNA, 693 bp, Xanthomonas axonopodis pv
  CDS (46)..(693): transl_table=11
ttgacgaatctcgactccccaatcacgaatcccgagctcttacccatgtccgaagcaaaacgcctggccgccgagaaagcgatcgattacgtggaagacggcatgatcgtcggagtgggcaccggttcgacggtggcttacttcatcgacgcgctgggccgcatcggccatcgcatcaagggcgccgtgtccagctccgaacagagcaccgcgcgcctgcgccagcatggcatcgaggtgctggacctcaatcacaccggcaatctgtcgctgtacgtggacggtgccgacgagtgcgacccgaaccgctgcctgatcaagggaggcggcgcagcgctgacgcgcgaaaagatcatcgccgaagccagcgagcgcttcatctgcatcgtcgacccgagcaagcaggtgccggtgctgggcaagttcccgctgccggtggaagtgattccgatggcgcgcagcctggtcgcccggcagatcctggcgctgaccggcggccagccggtgtggcgcgatggcgtggtgaccgacaacggcaacgtggtgctggacgtgcatcacctgcaagtcaccgacccggtgggcctggagcgcagcttgaaccagattcctggcgtggtctgcgtgggtttgttcgcgcggcgcccggccgacgtggtgatcgtgggcggcgagccaccgcaggtgatctga

SEQ ID NO: 3335 - protein, 215 aa, Xanthomonas axonopodis pv
MSEAKRLAAEKAIDYVEDGMIVGVGTGSTVAYFIDALGRIGHRIKGAVSSSEQSTARLRQHGIEVLDLNHTGNLSLYVDGADECDPNRCLIKGGGAALTREKIIAEASERFICIVDPSKQVPVLGKFPLPVEVIPMARSLVARQILALTGGQPVWRDGVVTDNGNVVLDVHHLQVTDPVGLERSLNQIPGVVCVGLFARRPADVVIVGGEPPQVI

SEQ ID NO: 3336 - DNA, 648 bp, Xanthomonas oryzae pv
  CDS (1)..(648): transl_table=11
atgtccgaagcaaaacgcctggccgccgaaaaagcgatcgattacgtggaagacggcatgatcgtcggagtcggtaccggctcgacggtggcctacttcatcgacgcgcttggccacatcggccatcgcatcaagggcgcagtctccagctccgaacagagcaccgcgcgcctgcgccagcacggcatcgaagtgctggacctcaatcacaccggcaatctgtcgctgtacgtggacggcgccgacgagtgcgacccgaaccgctgcctgatcaagggcggcggcgcagcgctgacgcgcgagaagatcatcgccgaggccagcgagcgcttcatctgcatcgtcgaccccagcaagcaggtgccggtgctgggcaaatttccgctgccggtggaagtgattccgatggcgcgcagcctggtggcccgacagatcctggcgctgaccggcggccagccggtgtggcgcgatgtcgtgctgaccgacaacggcaacgtggtgctggacgtgcacaacctgcagatcaccgacccggtcgcgctggagcgcagcttgaaccagattcctggcgtggtctgcgtgggtctgttcgcgcgacgcccggccgatgtggtgatcgtcggtggcgaaccgccgagggtactctga

SEQ ID NO: 3337 - protein, 215 aa, Xanthomonas oryzae pv
MSEAKRLAAEKAIDYVEDGMIVGVGTGSTVAYFIDALGHIGHRIKGAVSSSEQSTARLRQHGIEVLDLNHTGNLSLYVDGADECDPNRCLIKGGGAALTREKIIAEASERFICIVDPSKQVPVLGKFPLPVEVIPMARSLVARQILALTGGQPVWRDVVLTDNGNVVLDVHNLQITDPVALERSLNQIPGVVCVGLFARRPADVVIVGGEPPRVL

SEQ ID NO: 3338 - DNA, 738 bp, Xylella fastidiosa
  CDS (91)..(738): transl_table=11
atggaaactgctactgtcactagagtgaactcaacacagccagccaatgcctgtgcgccttcccacatcccaatcatcattaataaccccatgagcgaagcaaaacggcgcgccgccgaaaaggccatcgaatacgtcgagaacgatatgattatcggcgtcggcaccggctcaacagtcgcctacttcatcgacgcactaggacgtacccccaaacgcatcaaaggtgcagtatccagctccgaacagagcacagcacatttaaaacaacacgggatcgaggtcctggaactcaatcatactggcacactccccctctatgtagacggtgcagacgagtgcgacccgtacaaacgccttatcaaaggaggcggcgcatcattaacacgcgagaagatcatcgctgaagcaagcaaacaattcatttgtatcatcgacccaaacaaacaggtagcaacactaggcaagctccccctacccatcgaagtgatcccaatggcacgcagcttggttgcaaggcaaatcatggcacgtaccgacggtcaaccagtatggcgtgagggggtgattaccgataacggcaacgttatcctggatgtacatcacttacgcatcaccgacccggtaaagctagagcaagaactcaatcaaatcccaggggtcgtctgcgtcggcctgttcgcccgtcgctgtgcagacctagttatcatcggcagcgaaccgccgcacatactctga

SEQ ID NO: 3339 - protein, 215 aa, Xylella fastidiosa
MSEAKRRAAEKAIEYVENDMIIGVGTGSTVAYFIDALGRTPKRIKGAVSSSEQSTAHLKQHGIEVLELNHTGTLPLYVDGADECDPYKRLIKGGGASLTREKIIAEASKQFICIIDPNKQVATLGKLPLPIEVIPMARSLVARQIMARTDGQPVWREGVITDNGNVILDVHHLRITDPVKLEQELNQIPGVVCVGLFARRCADLVIIGSEPPHIL

SEQ ID NO: 3340 - DNA, 648 bp, Xylella fastidiosa
  CDS (1)..(648): transl_table=11
atgagcgaagcaaaacggcgcgccgccgaaaaggccatcgaatacgtcgagaacgatatgattatcggcgtcggcaccggctcaacagtcgcctacttcatcgacgcactaggacacaccccaaaacgcatcaaaggtgcagtatccagctccgaacagagcacagcacatttaaaacaacacggaattgaagtcctggaactcaatcataccggaacactcccactctatgtggacggtgcagacgagtgcgacccttacaaacgccttatcaaaggaggcggcgcatcattaacacgcgagaagatcatcgctgaagcaagcaaacaattcatttgtatcatcgacccaaacaaacaggtagcaacactaggcaagttcccactacccatcgaagtgatcccaatggcacgcagcttggttgcaaggcaaatcatggcacgtaccgacggtcaaccagtatggcgtgaaggggtcattacagataacggcaacgttatcctggatgtacatcacttatgcatcaccgacccggtaaagctagagcaagaactcaatcaaatcccaggggtcgtctgcgtcggcctgttcgcccgtcgctgtgcggacctagttatcatcggcagcgaaccgccgcacatactctga

SEQ ID NO: 3341 - protein, 215 aa, Xylella fastidiosa
MSEAKRRAAEKAIEYVENDMIIGVGTGSTVAYFIDALGHTPKRIKGAVSSSEQSTAHLKQHGIEVLELNHTGTLPLYVDGADECDPYKRLIKGGGASLTREKIIAEASKQFICIIDPNKQVATLGKFPLPIEVIPMARSLVARQIMARTDGQPVWREGVITDNGNVILDVHHLCITDPVKLEQELNQIPGVVCVGLFARRCADLVIIGSEPPHIL

SEQ ID NO: 3342 - DNA, 732 bp, Yarrowia lipolytica
  CDS (1)..(732)
atgtcctccgaactgcctcctcttgagcaggccaagcgaatcgccgcccaccaggccgtggagcaacactaccccaaggacgccaaggtcgtgggcattggctcaggatccaccgtggtctacgttgccgagaagattgcgtcgttgcccaaggagctcaccaaggacaccgtgttcatttctacgggtttccagagcaagcagctgatccagaacgccgggttgcgactgggatgcatcgaccagtactccaacggagatctggacgtggcgtttgacggcgccgacgagaccgaccctcagctcaactgcatcaagggcggaggagcatgcctcttccaggaaaagattgtcgccgagtgtgcccgcaagtttgtcgtggtggccgactaccgaaaacagtccaaggctctgggcaccgtgtggatccagggtatccccattgaggtggtgcccgacgcctacaacaaggtaattgctgatctcaagaagatgggcgcccagtccgcggtgctgcgacccggctctcccggaaaggcgggccccatcatcaccgacaatggcaacttcattgtcgacgcctactttggcgagatccaacccgacgccgtcaaggacctgcacatcaagatcaagctgctgttgggcgtcgttgagaccggcctcttcactaacgcggacgtagcgtactttggaaacgccgacggaaccatctccaccattaccaagtaa

SEQ ID NO: 3343 - protein, 243 aa, Yarrowia lipolytica
MSSELPPLEQAKRIAAHQAVEQHYPKDAKVVGIGSGSTVVYVAEKIASLPKELTKDTVFISTGFQSKQLIQNAGLRLGCIDQYSNGDLDVAFDGADETDPQLNCIKGGGACLFQEKIVAECARKFVVVADYRKQSKALGTVWIQGIPIEVVPDAYNKVIADLKKMGAQSAVLRPGSPGKAGPIITDNGNFIVDAYFGEIQPDAVKDLHIKIKLLLGVVETGLFTNADVAYFGNADGTISTITK

SEQ ID NO: 3344 - DNA, 828 bp, Oryza sativa
  CDS (1)..(828)
atgggcagcttcgcctcccccctcgacgccgcccccgcccctcccaccgccaagccctcccctccgccggcgccggcgccggccaacgggctggtgacccaggaggagctgaagcgggtggcggcgcaccgggccgtggagatggtggagcccgggatgacgctgggcctcggcacgggctccaccgcggcccacgcgctggaccgcctcggcgacctcctccggtccggggagctcgccgcggtggccggcgtcccgacctcgctcaagacggaggcgcacgccgccagggtggggatcccgatgctgccgctcggggaggcgggcgggatcgatctgtccatcgacggcgccgacgaggtcgacccggagctgaacctcgtgaaggggcggggtgggtcgctgctcagggagaagatgatcgaggggtccgggggaaggttcgtcgtcatcgtcgatgagtccaagctcgtcccgcggctcggctgtacgggcgccgtccccgtcgaggttgtccccttcgggtgcgaccacactctgggcctcgtccgcaaggtgttcgacggattgcctggcttcagcgcgaggctcaggacggtcgcctccaaggacggcgaggggaaggaggagatgttcgtcaccgacaacggcaactacatcgtcgagatgttcttcgaggatggcatacgcggcgacctcaacgagatcagcgaccgcctcctacggatcaccggcgtcgtcgagcacggcatgttcctcggcatggccacctcggtggtcgtcgccaagaaggacggcaccgtcgccctgctccacaagaagaagtaa

SEQ ID NO: 3345 - protein, 275 aa, Oryza sativa
MGSFASPLDAAPAPPTAKPSPPPAPAPANGLVTQEELKRVAAHRAVEMVEPGMTLGLGTGSTAAHALDRLGDLLRSGELAAVAGVPTSLKTEAHAARVGIPMLPLGEAGGIDLSIDGADEVDPELNLVKGRGGSLLREKMIEGSGGRFVVIVDESKLVPRLGCTGAVPVEVVPFGCDHTLGLVRKVFDGLPGFSARLRTVASKDGEGKEEMFVTDNGNYIVEMFFEDGIRGDLNEISDRLLRITGVVEHGMFLGMATSVVVAKKDGTVALLHKKK

SEQ ID NO: 3346 - DNA, 843 bp, Oryza sativa
  CDS (1)..(843)
atggccgccgccaccgtctccgtccgcttccacccggccgcatccgccgcgcgctgcggcggcggctcgcgccggagcaggcgcctgtccggggtcatcagggcgcagtcggcgccggcttcggcggcggcggcggcgctgacgcaggacgacctgaagaggctggcggcggtgcgcgcggtggagcaggtggagagcgggatggtgctggggctggggaccgggtcgacggcggccttcgccgtcgcggagatcggggcgctgctggcgtccgggaagctgagcggcatcgtcggggtgcccacctccaagcgcacgttcgagcaggcgcagtcgctcggcatcccgctctccaccctcgacgaccacccccgcatcgacctcgccatcgacggcgccgacgaggtcgatccagaccttaaccttgtgaaagggagaggtggtgcccttctccgggagaagatggttgaggcagcatcagacaagttcatcgttgttgttgacgagacaaagctagttaccggcttaggagggagtggtctagccatgcctgtggaggttgtgcagttctgctggaagtacaaccaagtgagattgcaggatctgtttaacgatgaaggatgcgaggcgaagctgagattggatgaaggcggcaaaccctacgttaccgacaactcaaactacatcgttgatttatacttcaagacgccgatcaaggatgcgttggcagcagggaaggagatctcagctttggaaggcgtcgttgagcatgggctgttcctggacatggcgacttcggtgatcatcgctggaacagatggcgtcagtgtcaaaacaaagtga

SEQ ID NO: 3347 - protein, 280 aa, Oryza sativa
MAAATVSVRFHPAASAARCGGGSRRSRRLSGVIRAQSAPASAAAAALTQDDLKRLAAVRAVEQVESGMVLGLGTGSTAAFAVAEIGALLASGKLSGIVGVPTSKRTFEQAQSLGIPLSTLDDHPRIDLAIDGADEVDPDLNLVKGRGGALLREKMVEAASDKFIVVVDETKLVTGLGGSGLAMPVEVVQFCWKYNQVRLQDLFNDEGCEAKLRLDEGGKPYVTDNSNYIVDLYFKTPIKDALAAGKEISALEGVVEHGLFLDMATSVIIAGTDGVSVKTK

SEQ ID NO: 3348 - DNA, 801 bp, Glycine max
  CDS (1)..(801)
atggccattccctacccccatttcatcgccaccgagaaagccgccatggacgccggcctcctccacccctcctccccctccgtcatcctcacccaagacgatttgaagaaaatcgccgcctacaaggccgtcgagtacgtggagtccggcatgatcctcggcctcggcaccggctccaccgccaagcatgccgtcgaccgcatcggcgagctcctccgccagggcaagctcaaggacatcgtcggaatccccacctccacaaaaacccacgaacaagccctctccctcgggatccccctctccgatctcgacgcccaccccgccatcgatctcgccatcgacggcgccgacgaggtcgaccccttcctcaacctcgtcaagggccgtggcggctccctcctccgagaaaaaatggtcgaaggcgcatgcaagaagttcatcgtcatcgttgatgagtccaagctcgtaaactatttggggggtagtgggttggccatgcccgttgaggttattaagttctgttggaggttcaccgcggcgaggttgcagaagctttttgaggaggctgggtgcgttgccaggctcagaacttttggggagaaggagaaggaggagccttatgtgacggataatgggaactttattgtggatttgtatttcgagaggagtattggggatttgaaggctgctagtgatgctattttgcagcttgctggggttgtggagcatggcatgtttcttgatatggctaccactgttattgttgcaggggagctcgggttgacggtcaagaacaagtag

SEQ ID NO: 3349 - protein, 266 aa, Glycine max
MAIPYPHFIATEKAAMDAGLLHPSSPSVILTQDDLKKIAAYKAVEYVESGMILGLGTGSTAKHAVDRIGELLRQGKLKDIVGIPTSTKTHEQALSLGIPLSDLDAHPAIDLAIDGADEVDPFLNLVKGRGGSLLREKMVEGACKKFIVIVDESKLVNYLGGSGLAMPVEVIKFCWRFTAARLQKLFEEAGCVARLRTFGEKEKEEPYVTDNGNFIVDLYFERSIGDLKAASDAILQLAGVVEHGMFLDMATTVIVAGELGLTVKNK

SEQ ID NO: 3350 - DNA, 801 bp, Glycine max
  CDS (1)..(801)
atggccattccctatcgcgagtcgtacgacaccgagaaagccgccatggacgccggcctcctccacccctcctccccctccgtcatcctcacccaagacgatctcaagaaaatcgccgcctacaaggccgtcgagtacgtggagtccggcatggtcctcggcctcggcaccggctccaccgccaagcatgccgtcgaccgcatcggcgagctcctccgccaaggcaagctcaaggacatcgtcggaatccccacctccacaaaaacccacgaacaagccctctccctcgggatccccctctccgatctcgacgcccaccccgccatcgatctcgccatcgacggcgccgacgaggtcgaccccttcctcaacctcgtcaagggccgtggcggctccctcctccgagaaaaaatggtcgaaggcgcatgcaagaagttcatcgtcatcgttgatgagtccaagctcgtaaactatttggggggtagtgggttggccatgcccgttgaggttattaagttctgttggaggttcaccgcggcgaggttgcagaagcttcttgaggaggctgggtgcgttgccaggctcagaacttttggggagaaggagaaggaggagccttatgtgacggataatgggaactttattgtggatttgtatttcgagaggagtattggggatttgaaggctgctagtgatgctattttgcagcttgctggagttgtggagcatggcatgtttcttgatatggctaccactgttattgttgcaggggagctagggctgacggtgaagaacaagtag

SEQ ID NO: 3351 - protein, 266 aa, Glycine max
MAIPYRESYDTEKAAMDAGLLHPSSPSVILTQDDLKKIAAYKAVEYVESGMVLGLGTGSTAKHAVDRIGELLRQGKLKDIVGIPTSTKTHEQALSLGIPLSDLDAHPAIDLAIDGADEVDPFLNLVKGRGGSLLREKMVEGACKKFIVIVDESKLVNYLGGSGLAMPVEVIKFCWRFTAARLQKLLEEAGCVARLRTFGEKEKEEPYVTDNGNFIVDLYFERSIGDLKAASDAILQLAGVVEHGMFLDMATTVIVAGELGLTVKNK

SEQ ID NO: 3352 - DNA, 801 bp, Glycine max
  CDS (1)..(801)
atggccattccctatcgcgagtcgtacgacaccgagaaagccgccatggacgccggcctcctccacccctcctccccctccgtcatcctcacccaagacgatctcaagaaaatcgccgcctacaaggccgtcgagtacgtggagtccggcatggtcctcggcctcggcaccggctccaccgccaagcatgccgtcgaccgcatcggcgagctcctccgccaaggcaagctcaaggacatcgtcggaatccccacctccacaaaaacccacgaacaagccctctccctcgggatccccctctccgatctcgacgcccaccccgccatcgatctcgccatcgacggcgccgacgaggtcgaccccttcctcaacctcgtcaagggccgtggcggctccctcctccgagaaaaaatggtcgaaggcgcatgcaagaagttcatcgtcatcgttgatgagtccaagctcgtaaactatttggggggtagtgggttggccatgcccgttgaggttattaagttctgttggaggttcaccgcggcgaggttgcagaagctttttgaggaggctgggtgcgttgccaggctcagaacttttggggagaaggagaaggaggagccttatgtgacggataatgggaactttattgtggatttgtatttcgagaggagtattggggatttgaaggctgctagtgatgctattttgcagcttgctggagttgtggagcatggcatgtttcttgatatggctaccactgttattgttgcaggggagctagggctgacggtgaagaacaagtag

SEQ ID NO: 3353 - protein, 266 aa, Glycine max
MAIPYRESYDTEKAAMDAGLLHPSSPSVILTQDDLKKIAAYKAVEYVESGMVLGLGTGSTAKHAVDRIGELLRQGKLKDIVGIPTSTKTHEQALSLGIPLSDLDAHPAIDLAIDGADEVDPFLNLVKGRGGSLLREKMVEGACKKFIVIVDESKLVNYLGGSGLAMPVEVIKFCWRFTAARLQKLFEEAGCVARLRTFGEKEKEEPYVTDNGNFIVDLYFERSIGDLKAASDAILQLAGVVEHGMFLDMATTVIVAGELGLTVKNK

SEQ ID NO: 3354 - DNA, 825 bp, Zea mays
  CDS (1)..(825)
atggccgccaccgcgatctcagtccgcctccacccaaccgccgcgcgccatgtggcctccgcccgccgcgcccgcctcggggccgtccgcgcgcagtccgcgccggcggcggcggcggcggcgctgacgcaggacgacctcaagcggctggcggcggtgcgcgccgtcgagcaggtgaagagcgggatggtgctcgggctcgggacgggctccacggccgccttcgccgtcgccgagatcggcgcgctcctggccgcgggcaagctcgagaagatcgtcggcgtgcccacatccaagcgcaccttcgagcaggcgcagtcgctcggcatcccgctctccacgctcgacgacaacccgctcatcgacctcgccatcgacggtgccgacgaggttgaccctgacctcaaccttgtgaaagggcggggtggtgctcttcttcgtgagaagatggttgaggcagcatcggacaagtttattgttattgttgacgagacaaaactagttgatgggttaggaggtagtggtctagccatgccagtggaagttgtgcagttctgctggaagtacaaccttgtaagattgcaggaactgtttaaggaggaaggagtcgaggcaaagctaaggtttgaaggcgacaagccctatgttactgacaactcaaactacatcgtcgatttatacttcaagacgccaatcaaggatgcgttggcagcaggacaggaaattgcagctctggaaggagttgttgaccatgggttgttcttgaacatggcgagttcagtgatcattgctggaacggacggtgtcagtgtcaaaacgaagtga

SEQ ID NO: 3355 - protein, 274 aa, Zea mays
MAATAISVRLHPTAARHVASARRARLGAVRAQSAPAAAAAALTQDDLKRLAAVRAVEQVKSGMVLGLGTGSTAAFAVAEIGALLAAGKLEKIVGVPTSKRTFEQAQSLGIPLSTLDDNPLIDLAIDGADEVDPDLNLVKGRGGALLREKMVEAASDKFIVIVDETKLVDGLGGSGLAMPVEVVQFCWKYNLVRLQELFKEEGVEAKLRFEGDKPYVTDNSNYIVDLYFKTPIKDALAAGQEIAALEGVVDHGLFLNMASSVIIAGTDGVSVKTK

SEQ ID NO: 3356 - DNA, 23 bp, Artificial sequence
  primer
atggctgccggtgtcccaaaaat

SEQ ID NO: 3357 - DNA, 25 bp, Artificial sequence
  primer
tcacttttcggtaacttcaacacta

SEQ ID NO: 3358 - protein, 258 aa, Artificial sequence
  consensus sequence
  Variant (2)..(7): Xaa in position 2 to 7 is any amino acid
  Variant (9)..(11): Xaa in position 9 to 11 is any amino acid
  Variant (12)..(24): Xaa in position 12 to 24 is any or no amino acid
  Variant (26)..(26): Xaa in position 26 is any amino acid
  Variant (28)..(28): Xaa in position 28 is any amino acid
  Variant (32)..(45): Xaa in position 32 to 45 is any amino acid
  Variant (46)..(57): Xaa in position 46 to 57 is any or no amino acid
  Variant (59)..(60): Xaa in position 59 to 60 is any amino acid
  Variant (62)..(71): Xaa in position 62 to 71 is any amino acid
  Variant (73)..(86): Xaa in position 73 to 86 is any amino acid
  Variant (87)..(95): Xaa in position 87 to 95 is any or no amino acid
  Variant (101)..(106): Xaa in position 101 to 106 is any amino acid
  Variant (107)..(108): Xaa in position 107 to 108 is any or no amino acid
  Variant (114)..(118): Xaa in position 114 to 118 is any amino acid
  Variant (121)..(133): Xaa in position 121 to 133 is any amino acid
  Variant (134)..(134): Xaa in position 134 is any or no amino acid
  Variant (136)..(137): Xaa in position 136 to 137 is any amino acid
  Variant (139)..(139): Xaa in position 139 is any amino acid
  Variant (141)..(146): Xaa in position 141 to 146 is any amino acid
  Variant (147)..(152): Xaa in position 147 to 152 is any or no amino acid
  Variant (154)..(154): Xaa in position 154 is any amino acid
  Variant (157)..(157): Xaa in position 157 is any amino acid
  Variant (159)..(175): Xaa in position 159 to 175 is any amino acid
  Variant (176)..(186): Xaa in position 176 to 186 is any or no amino acid
  Variant (188)..(190): Xaa in position 188 to 190 is any amino acid
  Variant (191)..(203): Xaa in position 191 to 203 is any or no amino acid
  Variant (206)..(206): Xaa in position 206 is any amino acid
  Variant (209)..(211): Xaa in position 209 to 211 is any amino acid
  Variant (213)..(227): Xaa in position 213 to 227 is any amino acid
  Variant (228)..(250): Xaa in position 228 to 250 is any or no amino acid
  Variant (253)..(255): Xaa in position 253 to 255 is any amino acid
  Variant (257)..(257): Xaa in position 257 is any amino acid
KXXXXXXAXXXXXXXXXXXXXXXXGXGXGSTXXXXXXXXXXXXXXXXXXXXXXXXXXVXXSXXXXXXXXXXGXXXXXXXXXXXXXXXXXXXXXXXDGADEXXXXXXXXIKGGGXXXXXEKXXXXXXXXXXXXXXDXXKXVXXXXXXXXXXXXPXEVXPXXXXXXXXXXXXXXXXXXXXXXXXXXXXRXXXXXXXXXXXXXXXXTDXGNXXXDXXXXXXXXXXXXXXXXXXXXXXXXXXXXXXXXXXXXXXGVXXXGXF

SEQ ID NO: 3359 - protein, 28 aa, Artificial sequence
  protein pattern
  Variant (5)..(5): Xaa in position 5 is Ala or Gly
  Variant (6)..(6): Xaa in position 6 is Ala, Cys, Asn or Ser
  Variant (7)..(9): Xaa in position 7 to 9 is any amino acid
  Variant (12)..(16): Xaa in position 12 to 16 is any amino acid
  Variant (17)..(17): Xaa in position 17 is Ala, Gly, Ser or Thr
  Variant (18)..(22): Xaa in position 18 to 22 is any amino acid
  Variant (23)..(23): Xaa in position 23 is Ile, Leu, Met or Val
  Variant (24)..(24): Xaa in position 24 is any amino acid
  Variant (26)..(27): Xaa in position 26 to 27 is any amino acid
KGGGXXXXXEKXXXXXXXXXXXXXDXXK

SEQ ID NO: 3360 - protein, 16 aa, Artificial sequence
  protein pattern
  Variant (2)..(2): Xaa in position 2 is Ile, Leu or Val
  Variant (4)..(4): Xaa in position 4 is Ser or Thr
  Variant (8)..(15): Xaa in position 8 to 15 is any or no amino acid
GXGXGSTXXXXXXXXA

SEQ ID NO: 3361 - DNA, 1632 bp, Saccharomyces cerevisiae
  CDS (1)..(1632)
atgggcctctacgtttcctcagaaaacgaattgcaggaaaagcttaaatctttcaggtctgctaagatcactgaatcacgaaataaattaataagatatctaagaatcttttggttcggttttaatgataatattgttgagcctgtatgcacgattttaaggtttttagaaatttcagctatttttttacctcttctcctattataccccatatcatggtttggtcataaactcaaaattacggacaccaatataactgaaactcgaggttcattgatttggtgtcaactactgcgtaaagcattggaattggctggcccgagtttcattaaactcggacaatgggcaggatcgagaaccgatatattctctcacgcactgtgtcatgagttgggtaaattgcatagtaacgttacagctcactctctaagctttactctggaaaaactttctcaagcattaaaggttgacaagatcgaagatgcttttgatgaatttaatcgaacaccaattggagttgggtccatcgcacaagtttacgtgggtgaactatcccaaaagtacatcgataaatatgacaatatacaaattggtaaggatggaaatcgttggtgtgccatcaagatcttgcatccaaatgtaagatctcagatccggagagatttgaaaataatgaaattctgtgctgacgcaataaattggattccgactatggaatggctgtctttacccagcgaagtcgatcagttttccatattaatgaatattcagttggatctaagaattgaggcgttaaacctggaaagattcaatgagaactttaaaaattctattcaggtgaaatttcctaaaccatttctccccttgtcaaatagggatgttatgttcgaagagcatgtatatggtctttccatggaaaagtttttatctacgaagaagcaaattaacgacgttgaactttgtaaaaaagtcagtgatcccttcgttgacgcgtttctacaaatgctaattcttgatgattttgttcatgctgatttgcatccaggcaatgttataatcagatttgtgaagacgaacaaatacggcacaaacattatatcctccgaacttgaatcgtacagaataacgcacgacctgaggaagaagatagaggaggaccaagatcaggactttgttggaaaactgaagtctgtattaactaattacactccccaaatttgttttatcgatacaggaataattacagaattgaatgaaaaaaacagaattaatttcatagctctattcaacgcattggcccgatttgatggttatagagctggtgagttgatgattgagagatcaagaactccagaaacagctattgataaggaagtatttgcgtttaaggtagaaaagctagtggataaagttaaacaaagaacatttacattgggaaccgtctcaattggcgatttactcgatcaaatgcttagtatggtaaggtcgcaccatgttagaatggagtccgactttgtttccgtggtggtcgctattttacttctagagggtattggacgccagttagatccaaacttggacttatttgaaaggttcgtattttacgcatggattaacggttttaaagaataa

SEQ ID NO: 3362 - protein, 543 aa, Saccharomyces cerevisiae
MGLYVSSENELQEKLKSFRSAKITESRNKLIRYLRIFWFGFNDNIVEPVCTILRFLEISAIFLPLLLLYPISWFGHKLKITDTNITETRGSLIWCQLLRKALELAGPSFIKLGQWAGSRTDIFSHALCHELGKLHSNVTAHSLSFTLEKLSQALKVDKIEDAFDEFNRTPIGVGSIAQVYVGELSQKYIDKYDNIQIGKDGNRWCAIKILHPNVRSQIRRDLKIMKFCADAINWIPTMEWLSLPSEVDQFSILMNIQLDLRIEALNLERFNENFKNSIQVKFPKPFLPLSNRDVMFEEHVYGLSMEKFLSTKKQINDVELCKKVSDPFVDAFLQMLILDDFVHADLHPGNVIIRFVKTNKYGTNIISSELESYRITHDLRKKIEEDQDQDFVGKLKSVLTNYTPQICFIDTGIITELNEKNRINFIALFNALARFDGYRAGELMIERSRTPETAIDKEVFAFKVEKLVDKVKQRTFTLGTVSIGDLLDQMLSMVRSHHVRMESDFVSVVVAILLLEGIGRQLDPNLDLFERFVFYAWINGFKE

SEQ ID NO: 3363 - DNA, 1869 bp, Glycine max
  CDS (1)..(1869)
atgcttggaaacgtagggaaagttgcccaatctattcttagaacccatagaagaagatatttggaagcaagtagaaatgaggcttttacctcagttggaccaaatatcaagcaatgcaggatgtacatgcaatataagtttccaattgaaggatgtaattcattcttgtggcactggacaagagaaaactttcacaaaggctgttcttttaggaacttctctgtaacttctgcaagaaatgtagcagcatataattctcgaatagcttggaagttgctgtacaaaaaatactcttccaatggttataatggatttacctccataaatatgattgctcaagcagtgagcctggctttgactcgttcttatttgctggttcctggttttttagcatttgctagtggaaagctagcattggctcagcaaaatggggcagacacagaattttacccatcacagaatgcattgtatatgcatgcacaagatgggtatggttacatgtttgcatttgtattcattgtagtggaaagccttgttttgttagtgagagctatctatctggccatattattctctccaagcatactgatggcgccacttgcagattattttggaccagaattcaggaaaatgtggctatcggttgttcatcgtacactagaaaaagcaggtccagcattcataaaatggggtcagtgggctgctacccggcctgatctgtttcctcgagatctatgtactaagcttgccgaacttcagacgaaagcacctcaacatagttttagctacacaaagaaaactattgaaagagcgtttggtcgaaaaatttctgagatttttgagaattttgaagaagtgcctgttgcatctggaagtattgcccaagtgcatcgtgcttctctaaaatatcgttaccctgggcagcaagcaaaacccctggtggttgctgtaaaagttagacatcctggtgtcggagaatctatcagaagggattttgctattatcaatttggtggcaaaatcttcaaagttcatccatgctcttaattggttaaggttggatgaaagtgttcaacagtttgcagttttcatgatgtctcaagttgaccttgcacgggaagctgctcacttgagccgcttcatttacaatttccgtcgatcgagggatgtctcttttcctaagcctgtctatccacttgtgcatcctgcagttttggtggaaacctatgaaaatggagaaagtgtatcacattatgtagatgagcttcaaggacatgaaaggattaaaagtgctcttgctcacattggtactaatgcacttttgaagatgcttctggtggacaacttcattcatgcagacatgcatcctggaaatatccttgtacggagcaagcctcacaaacgacttttcaaatcaaagccgcatgtaattttccttgacgtaggcatgactgctgaactctctggcagtgatcgggtaaatttattggaatttttcaaagctgttgctcaccgagatggtcggacagctgcagagtgcacactcaggttatcaaagcaacagaactgtccaaatccaaaggcctttgttgaggaaatggaagagtcgtttactttttggggtactccagaaggtgatctggtccatcctgccgagtgcatggagcaattgcttgagaaagttaggcgtcataaagttaatgttgatggcaatgtttgtactgtcttggtcaccaccttggttcttgagggttggcagcgcaagcttgatcctgggtatgatgtgatgaatactctgcagacattgctgcttagagctgattgggcaaagtctctttcatacacaattgatgggctcatggccccttga

SEQ ID NO: 3364 - protein, 622 aa, Glycine max
MLGNVGKVAQSILRTHRRRYLEASRNEAFTSVGPNIKQCRMYMQYKFPIEGCNSFLWHWTRENFHKGCSFRNFSVTSARNVAAYNSRIAWKLLYKKYSSNGYNGFTSINMIAQAVSLALTRSYLLVPGFLAFASGKLALAQQNGADTEFYPSQNALYMHAQDGYGYMFAFVFIVVESLVLLVRAIYLAILFSPSILMAPLADYFGPEFRKMWLSVVHRTLEKAGPAFIKWGQWAATRPDLFPRDLCTKLAELQTKAPQHSFSYTKKTIERAFGRKISEIFENFEEVPVASGSIAQVHRASLKYRYPGQQAKPLVVAVKVRHPGVGESIRRDFAIINLVAKSSKFIHALNWLRLDESVQQFAVFMMSQVDLAREAAHLSRFIYNFRRSRDVSFPKPVYPLVHPAVLVETYENGESVSHYVDELQGHERIKSALAHIGTNALLKMLLVDNFIHADMHPGNILVRSKPHKRLFKSKPHVIFLDVGMTAELSGSDRVNLLEFFKAVAHRDGRTAAECTLRLSKQQNCPNPKAFVEEMEESFTFWGTPEGDLVHPAECMEQLLEKVRRHKVNVDGNVCTVLVTTLVLEGWQRKLDPGYDVMNTLQTLLLRADWAKSLSYTIDGLMAP

SEQ ID NO: 3365 - DNA, 1878 bp, Glycine max
  CDS (1)..(1878)
atgcttagaaatataaggagagctgcccagtctgtttgtagaatcaatagcagatacctggaagtgagtaaaaatgggccagttgtctcagttggaccgaatatccaccactgccggttgtacatgcaatataagtttccaagtgaagcatgcagttcattcttgtggcatgggacaagggaaggctttcgtaaacgtggttctttcaggaacttttctgtaacctcagcaagtaatacagtcacgcaccattcccagattgcttggaaaaggctgtacagaaagtattgttccagtggtgatggtacatttcctcctaccgtaaatatgattgctcaggcagtaagcttggctttggctcgttcttatttgctagttcctggtattttggcatttacatgtggagagcttgcattagctcagcaaaattgggcagatgcagaacgttacccatcacagaatggtttgtatatgcgtgcacaagatgggtataattacatgtttacatttgcattcataatagttgaaggacttatcttattgatgagggctctctatctggcaatattattctctcctagcattgtgatggcaccatttgcagattgttttggaccaaactttaggaaactgtggctccatgtagttcatcgcacactagaaaaatcaggtccagcattcataaaatggggtcagtgggcagctacacggcctgatctctttcctcgagatctatgcactaagctttcagaacttcataccaaagctcctgagcatagtttctgctacacaaagaaaactatagaaagagcatttggccgaaaaatttctgaaatttttgacaattttgaagaacttcctgttgcatctggaagcattgctcaagttcaccgtgcttcactaaaatgtcgttatcctggtcagcaggcaaagccactattggttgcagttaaggttagacatcctggcgtgggagagtcaattagacgggattttgctattattaatttggcggcaaaaatttcaaagttcattcctgctcttaattggttacgattagatgagagtgtacaacaatttgcagttttcatgatgtctcaagttgaccttgctagggaagctgcccatttgagtcgctttatttataatttccgtagatggaaggatgtttctttccccaagcctgtctatccacttgtgcacccggctgttttggtggaaacatatgaaaagggtgaaagtgtctcatattatgttgatgatcttcaaggacatgaacgggttaaatctgctcttgcccacattggtactcatgcacttttgaaaatgcttctggtggacaacttcattcatgcagatatgcatcctggaaatatccttgttcgagtgtctcagaacaagtctcgaaaacggctcttcaaatcaaagcctcatgtagttttccttgatgtaggcatgactgccgaactctctggtagtgatagagtaaatttactggaattttttaaagctgttgcccgccgagatggccggactgctgcagaatgtgccctgaacttgtcaaatcaacagaactgtccaaatccggaggccttcattgaggaggtggaagagtcatttactttttggggcaccccagaaggtgatattgttcatcctgcagagtgcatggaacaattacttgagaaagttaggcgtcatagagttaatattgatggcaatgtttgtactgtcatggtgacaaccttagttcttgagggttggcagcgaaaacttgatcctgggtacaatgtgatgcagacattgcagacattgctacttagagctgattgggcaaagtctctttcgtacacaattgacggactcatggccccttag

SEQ ID NO: 3366 - protein, 625 aa, Glycine max
MLRNIRRAAQSVCRINSRYLEVSKNGPVVSVGPNIHHCRLYMQYKFPSEACSSFLWHGTREGFRKRGSFRNFSVTSASNTVTHHSQIAWKRLYRKYCSSGDGTFPPTVNMIAQAVSLALARSYLLVPGILAFTCGELALAQQNWADAERYPSQNGLYMRAQDGYNYMFTFAFIIVEGLILLMRALYLAILFSPSIVMAPFADCFGPNFRKLWLHVVHRTLEKSGPAFIKWGQWAATRPDLFPRDLCTKLSELHTKAPEHSFCYTKKTIERAFGRKISEIFDNFEELPVASGSIAQVHRASLKCRYPGQQAKPLLVAVKVRHPGVGESIRRDFAIINLAAKISKFIPALNWLRLDESVQQFAVFMMSQVDLAREAAHLSRFIYNFRRWKDVSFPKPVYPLVHPAVLVETYEKGESVSYYVDDLQGHERVKSALAHIGTHALLKMLLVDNFIHADMHPGNILVRVSQNKSRKRLFKSKPHVVFLDVGMTAELSGSDRVNLLEFFKAVARRDGRTAAECALNLSNQQNCPNPEAFIEEVEESFTFWGTPEGDIVHPAECMEQLLEKVRRHRVNIDGNVCTVMVTTLVLEGWQRKLDPGYNVMQTLQTLLLRADWAKSLSYTIDGLMAP

SEQ ID NO: 3367 - DNA, 1740 bp, Glycine max
  CDS (1)..(1740)
atgtctcatcttattccttctggtatgtaccttccatatttcttcactcaatcaaacatgacagttaactttttgacgagttgcggggctaggaacttgtataccctccctgcaaataatgtaaaatatcatcatggtcaagttgtttggaacatgatgtgtttccataaagggccagctctaccgccaataggtcaaattgcccgtgcggtaagtttggctatggtcaaatcaaattttgttgttcatggtgtgattgtcttcataataggagagcttgcttggacacaaggaaaatgggctgaagcagaatccttcccaacaagggattcactttatgtgcatgcacaagacgggcatgtgtatttaactgcagctctcttggcagccattgagatttttatcttgtttctcagggctgcctatttggtgattttgttctgtccttgcatagctatggctcctttagttggtttttttggcactcaatttagaaaaacatggattcatgttgttcgagttacactagaaaaagctggtccagcgttcattaagtggggtcaatgggctgcaaccagacctgacctctttccaagggatctctgtgatgaacttgcagaatttcaaaccaaagcgccatcacataaatttagctatagcagaaaatgtatagagaatgcatttggtcacaaattatctgaaatatttgaaaattttgaggaggaaccagtagcttcaggtagcattgctcaagttcatcgagctacactaaaatacaaattccctggtcagcaaaccaagcctgttgttgtagcagtgaaagtccgacatcctggggtttctgaagcaattaaaagggattttatccttatcaatcttgttgccaagatttcgtctttcttccccaatttgaagtggttgagactagatgaaagcatacagcaattttctgtttttatgatgtctcaagttgatctttcaagggaagcagtgcatcttagtcggtttatctataatttccggagatggaaagatgtttcatttccaatgcctctgtatccccttgtgcacccttctgttttggtagaaacctttgaacaaggtgaaagtgttttgcactatgttgaccagcctgaaggacatgagcatttcaaaagcacccttgctcatattggaacacatgctcttttaaagatgcttttggtggataattttatccatgcagacatgcatcctggaaatattcttgtccgagtaggaaaaagcaaatcaactctcttgaagtcaaggcctcatgtcattttccttgatgtgggcatgactactgaactttctaagagagaacgagaatatttagtcgaattcttcaaggctatagcacttcaagatggccgcactgctgcagagtgcacacttagattatcaaaacgtcaaaattgcccagatccgaaatctttcattgaggaggtggataaatcgtttgaactttggaggtccccagaaggtgaatctgtccacactgctgatcgtatgcaacaattgcttgagcatgttaggcgctgtaaagttaatatcgatggcaatgtttgcgctgtgatagttaccacattggtcctggagggttggcagcgaagacttgatccagaatatgatgtgttgcacgctttgcaagcactgctatttaaagctgacttggcagagtctctatcttatgccattgaaggattggtggctccatga

SEQ ID NO: 3368 - protein, 579 aa, Glycine max
MSHLIPSGMYLPYFFTQSNMTVNFLTSCGARNLYTLPANNVKYHHGQVVWNMMCFHKGPALPPIGQIARAVSLAMVKSNFVVHGVIVFIIGELAWTQGKWAEAESFPTRDSLYVHAQDGHVYLTAALLAAIEIFILFLRAAYLVILFCPCIAMAPLVGFFGTQFRKTWIHVVRVTLEKAGPAFIKWGQWAATRPDLFPRDLCDELAEFQTKAPSHKFSYSRKCIENAFGHKLSEIFENFEEEPVASGSIAQVHRATLKYKFPGQQTKPVVVAVKVRHPGVSEAIKRDFILINLVAKISSFFPNLKWLRLDESIQQFSVFMMSQVDLSREAVHLSRFIYNFRRWKDVSFPMPLYPLVHPSVLVETFEQGESVLHYVDQPEGHEHFKSTLAHIGTHALLKMLLVDNFIHADMHPGNILVRVGKSKSTLLKSRPHVIFLDVGMTTELSKREREYLVEFFKAIALQDGRTAAECTLRLSKRQNCPDPKSFIEEVDKSFELWRSPEGESVHTADRMQQLLEHVRRCKVNIDGNVCAVIVTTLVLEGWQRRLDPEYDVLHALQALLFKADLAESLSYAIEGLVAP

SEQ ID NO: 3369 - DNA, 1809 bp, Glycine max
  CDS (1)..(1809)
atgtttctatttgattgccttcaccacgatcttgaagagctagagatctattctaccaaaggaaattttccaagtgaagcatgcagttcattcttgtggcatgggacaagggaaggctttcgtaaatgtggttctttcaggaacttttccgtaacctcagcaagtaatgcagtcacacatcattcccagattgcttggaaaaggctgtacagaaagtattgttccagtggtgatggtacatttcctcccaccgtaaatatgattgctcaggcagtaagcttggctttggctcgttcttattttctagttcctggtattttggcatttacatggggagagcttgcattagctcagcgaaattgggcagaagcagaacgttacccatcacaaaatggtttgtatatgcgcgcacaagatgggtataattacatgtttacatttacattcataatagttgaaggacttatcttattaatgagggctctctatctagcaatattattctctcctagcattgtgatggcaccatttgctgattgttttggaccaaactttaggaaactgtggctcaatgtagttcatcgcacactagaaaaatcaggtccagcattcataaaatggggtcagtgggcagctacacggcctgatctctttcctcgagatctgtgcactaagctttcagaacttcataccaaagctcctgagcatagtttcagctacacaaagaaaactatagaaagagcatttggtcgaaaaatttcagaaatttttgacaattttgaagaacttcctgttgcatctggaagtattgctcaagtgcaccgtgcttcattaaaatgtcgttatcctggtcagcaagcaaagccactattggttgcagttaaggttagacatcctggcgtgggagagtcaatcagacgggattttgctattattaatttggcggcaaaaatttcaaagttcattcctgctcttaattggttacgattagatgagagtgtacaacaatttgcggttttcatgatgtctcaagttgaccttgctagggaagctgcccatttgagtcgcttcatttataatttccgcagatggaaggatgtttcttttcccaagcctgtctatccacttgtgcacccggctgttctggtggaaacatatgaaaagggtgaaagtgtctcatattatgttgatgatcttcaaggacatgaacgggttaaatccgctcttgctcacattgggactcatgcacttttgaaaatgcttctggtggacaacttcattcatgcagatatgcatcctggaaatatccttgttcgagtgtctcagagcaagtctcgcaaacggctcttcaaatcaaagcctcatgtagttttccttgatgtaggcatgactgctgaactctctggtagtgatagagtaaatttactggaattttttaaagctgttgcccgccgagatggccggactgctgcagaatgtgccctcaacttgtcaaagcaacagaactgtccaaatccggaggccttcatagaggaggtggaagagtcgtttactttttggggcaccccagaaggtgatattgttcatcctgcagagtgcatggagcaattacttgagaaagttaggcgtcatagagttaatattgatggcaatgtttgtactgttatggtgacaaccttggttcttgagggttggcagagaaagcttgatcctgggtacaatgtgatgcagacactgcagacattgctacttagagctgattgggcaaagtctctttcttacacaattgacggactcatggccccttag

SEQ ID NO: 3370 - protein, 602 aa, Glycine max
MFLFDCLHHDLEELEIYSTKGNFPSEACSSFLWHGTREGFRKCGSFRNFSVTSASNAVTHHSQIAWKRLYRKYCSSGDGTFPPTVNMIAQAVSLALARSYFLVPGILAFTWGELALAQRNWAEAERYPSQNGLYMRAQDGYNYMFTFTFIIVEGLILLMRALYLAILFSPSIVMAPFADCFGPNFRKLWLNVVHRTLEKSGPAFIKWGQWAATRPDLFPRDLCTKLSELHTKAPEHSFSYTKKTIERAFGRKISEIFDNFEELPVASGSIAQVHRASLKCRYPGQQAKPLLVAVKVRHPGVGESIRRDFAIINLAAKISKFIPALNWLRLDESVQQFAVFMMSQVDLAREAAHLSRFIYNFRRWKDVSFPKPVYPLVHPAVLVETYEKGESVSYYVDDLQGHERVKSALAHIGTHALLKMLLVDNFIHADMHPGNILVRVSQSKSRKRLFKSKPHVVFLDVGMTAELSGSDRVNLLEFFKAVARRDGRTAAECALNLSKQQNCPNPEAFIEEVEESFTFWGTPEGDIVHPAECMEQLLEKVRRHRVNIDGNVCTVMVTTLVLEGWQRKLDPGYNVMQTLQTLLLRADWAKSLSYTIDGLMAP

SEQ ID NO: 3371 - DNA, 1869 bp, Glycine max
  CDS (1)..(1869)
atgcttggaaacgtagggaaagttgcccaatctattctcagaacccatggaagaagatatttggaagcgagtagaaatgaggcctttaactcagttggaccaaatattaagcactgcaagatgtacatgcaatataagtttccaagtgaaggacgtagttcattcttgtggcactggacaagagaaaactttcacaaaggctgttcttttagaaacttctctgtaatttcggctagtaatgtagcagcatataattgtcgaatagcttggaagtttctgtacaaaaaatactcttccaatggttataatggatttacctccataaatatgattgctcaagcagtgagcctggctttgactcgttcttatttgctggttcctggttttttggcatttgctagtggaaagctagcattggctcagccaaatggggcagacacagaattttacccatctcagaatgctttgtatatgcatgcacaagatgggtatggttacatgtttgcatttgtattcattgtagtggaaagccttgtcttgttagcgagagctatctatctggccatattattctctccaagcatactgatggcgccacttgcagattattttggaccagagttcaggaaaatgtggctatcagttgttcattgcacactagaaaaagcaggtccagcattcataaaatggggtcagtgggctgctacccggcctgatctgtttcctcaagatctatgtactaagcttgccgaacttcagacgaaagctcctcaacatagttttagctacacaaagaaaactatagaaagagcatttgggcgaaaaatttctgaaatttttgagaattttgaagaagtgcctgttgcatctggaagtattgcacaagtgcatcgtgcttctttaaaatatcgttaccctggtcagcaagcaaagcccctggtggttgcagtgaaggttagacatcctggtgtgggagaatctatcagaagggattttgctattataaatttggtggcaaaatcttcaaagttcatacatgcacttaattggttaaggttggatgaaagtgttcaacagtttgcagttttcatgatgtctcaagttgaccttgcaagggaagctgctcatttgagccgcttcatttacaatttccgtcgatcgagggatgtctcttttcctaagcctgtctatccacttgtgcatcctgcagttttggtggaaacctatgaaaatggagaaagtgtatcacattatgtagatgaacttcaaggacatgaaaggattaaaagtgctcttgctcacattggtactaatgcacttttgaagatgcttctggtggacaacttcattcatgcagacatgcatcctggaaatattcttgtacggaacaagcctcacaaacggcttttcaaatcaaagccacatgtaattttccttgatgtaggcatgactgctgaactctctggcagtgatcgggtaaatttattggaatttttcaaagctgttgcccatcgagatggtcggacagctgcagagtgcacactcaagttatcaaagcaacagaactgtccaaatccgaaggcctttgttgaggagatggaagaggcgtttactttttggggcactccagaaggtgacctggtccatcctgccgagtgcatggagcaattgcttgagaaagttaggcgtcataaagttaacgttgatggcaatgtttgtactgtcttggtgaccaccttggttcttgagggttggcagcgcaagcttgatcctgggtatgatgtgatgaatactctgcagacattactgcttagagctgattgggctaagtctctttcctacacaattgatgggctcatggccccttga

SEQ ID NO: 3372 - protein, 622 aa, Glycine max
MLGNVGKVAQSILRTHGRRYLEASRNEAFNSVGPNIKHCKMYMQYKFPSEGRSSFLWHWTRENFHKGCSFRNFSVISASNVAAYNCRIAWKFLYKKYSSNGYNGFTSINMIAQAVSLALTRSYLLVPGFLAFASGKLALAQPNGADTEFYPSQNALYMHAQDGYGYMFAFVFIVVESLVLLARAIYLAILFSPSILMAPLADYFGPEFRKMWLSVVHCTLEKAGPAFIKWGQWAATRPDLFPQDLCTKLAELQTKAPQHSFSYTKKTIERAFGRKISEIFENFEEVPVASGSIAQVHRASLKYRYPGQQAKPLVVAVKVRHPGVGESIRRDFAIINLVAKSSKFIHALNWLRLDESVQQFAVFMMSQVDLAREAAHLSRFIYNFRRSRDVSFPKPVYPLVHPAVLVETYENGESVSHYVDELQGHERIKSALAHIGTNALLKMLLVDNFIHADMHPGNILVRNKPHKRLFKSKPHVIFLDVGMTAELSGSDRVNLLEFFKAVAHRDGRTAAECTLKLSKQQNCPNPKAFVEEMEEAFTFWGTPEGDLVHPAECMEQLLEKVRRHKVNVDGNVCTVLVTTLVLEGWQRKLDPGYDVMNTLQTLLLRADWAKSLSYTIDGLMAP

SEQ ID NO: 3373 - DNA, 1776 bp, Strongylocentrotus purpuratus
  CDS (1)..(1776)
atgttcattcatcacatctcccgcattactcttcaacttagaagagtaagaccccttcactggacagtactcaaacgtctacctcagccaaaatatcatcccaccaaatctgttgctctaacggtatgctgtgctttcattggagtagcatcgtacaagcgtttgccacaaattctattttccagagcagcatgtcaagaagcagttctagatcaccctgttcttattaactcagagattgatagacttcattctgtcaagtcattgttagttgggcagatgagactctggcatcatgtcctcagaactcttgcatcaaaccttgttcagtttgtcctggtgtccctacgctacatccgcaattccatcctctttggaccacttctcttctcctatccactagtactccttttcccagacaggctccaggatgtatggctacgtgcgctcctgcgatccattgaactctccggacccaccttcatcaagctcggtcagtgggcgagtactaggagagacctcttttcgcaggacttttgcgatcagctctcgaagctgcaccgcaatgctccaagccactcagtagaatacacaaagagagctctggaacatgcctttggtttattaggaaaggagatattcaggttggagtctggcaatgagactgtgtattcaggatgtgtagggcaggttcataaagcatatatgagaccagatgtctaccaagctgtaatgaaaggaagggaaggtggactgagagactggaggatgagagatcgagcatcagatccaatcatggatgaggaaaagtggataccagttgctgtaaaggtccttcacccaggtatctatgagagtgtccatctagatctgaggattattaatgtctttgccaggatactgaacctaattcctggtctccattggctcagccctgtcgaccttgtggatgagtttgaatctcttatgaaaaatcaaataaacctcaagctagaagcagaaaaccttgagagatttcatcaaaacttttccaaagtgcctcatgtaagaatacctcaaccagtatggccgtttgtcactaatgagatcctagttgaaacatttgagagtggtcagagcatatcagcatttatatcctgcgatcctgacaacccagacgagaaaggcattaagaagatccttgctcaaatgggagtagatgtgattttgaagatggtctttgtggataactttgtacatgcagaccttcatcctgggaacattctagtccagggagtagaagaggccctggtccaaccaagcaggaccgtggactttcatgaccacattacagagttccaggtctacctcaaggaacctaagaatccaatcaagttggtcctgcttgatactggcatcacgtcccatctggaggagagggatttcaacaacttctataaagttttcactgcaattgtactccgcaagggtgatgttgtagctgaactgtttgcggagcatgcatcttcaaatgaatgcaatgatgtggagaaattcaaagctgacatgaaatcgttggtcgaaaaggctcatgaacggagtctacaactgagcaagatgcaagttggtcagctgctaagggaattatttgctcttatgattcatcacaaggtgaagctggaaagtaacttcgcatccatcatacttgccatcatggtgttggaaggactgggtcggtctctagaccccaacctagacattctaaaagcagctaagccagttctactaggaagatga

SEQ ID NO: 3374 - protein, 591 aa, Strongylocentrotus purpuratus
MFIHHISRITLQLRRVRPLHWTVLKRLPQPKYHPTKSVALTVCCAFIGVASYKRLPQILFSRAACQEAVLDHPVLINSEIDRLHSVKSLLVGQMRLWHHVLRTLASNLVQFVLVSLRYIRNSILFGPLLFSYPLVLLFPDRLQDVWLRALLRSIELSGPTFIKLGQWASTRRDLFSQDFCDQLSKLHRNAPSHSVEYTKRALEHAFGLLGKEIFRLESGNETVYSGCVGQVHKAYMRPDVYQAVMKGREGGLRDWRMRDRASDPIMDEEKWIPVAVKVLHPGIYESVHLDLRIINVFARILNLIPGLHWLSPVDLVDEFESLMKNQINLKLEAENLERFHQNFSKVPHVRIPQPVWPFVTNEILVETFESGQSISAFISCDPDNPDEKGIKKILAQMGVDVILKMVFVDNFVHADLHPGNILVQGVEEALVQPSRTVDFHDHITEFQVYLKEPKNPIKLVLLDTGITSHLEERDFNNFYKVFTAIVLRKGDVVAELFAEHASSNECNDVEKFKADMKSLVEKAHERSLQLSKMQVGQLLRELFALMIHHKVKLESNFASIILAIMVLEGLGRSLDPNLDILKAAKPVLLGR

SEQ ID NO: 3375 - DNA, 1332 bp, Physcomitrella patens subsp. patens
  CDS (1)..(1332)
atgggaaagacagtcgaagcgattatactctggtttaggttaatatatttggtggtactctttactccaacccttgttgttggggtctttatcaaccagaccgagggaggactacggaggttttggttacatcttttactgcggtcacttgaagctgctggtccggccttcataaaatggggacaatgggcttctacacgacctgatatctttcccgcagacatttgcgacgagctttctaggctgcatatgcaggctcccaggcatagctatgcagaaacaaggaaaatcatggagaaagcttttagggttcctattgaaaccttatttgacgacttcgagtgcgagcctgtggcttccggtagcattgctcagattcaccgggctgtgttaaagaaacctcctggaaacggtcctcctctaattgttgctgtgaaggttcgacatccaaaagtcaatgaccttatacaaaaagattttgttatcatcagatatttagctcggatatcaacagcgcttccaggcattaagcacttacagctggataagagtgttcaacactttgctgcttttatgaccaggcaggtggatttaacattagaggctgctcacctccagagatttatttataattttcgaaagtcaaaagatgtttcttttcccacacctatttatccatacgtgcatcccacagttttggtagagacgtacgaagaagggctttcagtggcgaagtatgtaaattcaggacctctgacaaaaacacactcacagcttgcaaacattggcagtagctgcctcttaaagatgatgcttcaagacaattttattcacggagatttacacccaggaaatatttttgtgcgatttgtagacaatgttcccaagattgtccttttagatgtgggcatgacagcagaattgaattcacacagtcgggcagtaatgctacaactttttaaggctgttgcatctaaaaatggacgtgatgttgctacttacactttgcaattttcagatgatcagacttgtccagatccggaggcttttaagcaggccgtggatgataaatttaaagaatatctgtccattcgaggaacagcgaaaaatactggcgagtgtatgactgaattatttgaccaaatacgcaagcatcatgtgaacatggacggcgatgtgtgcactgttatggtcactactttgatattagagggttggcaaaggaaattggatcctgatcttgatttgtttaagatcttgggagacatgttgatggcagcagaatatgcaattcctttcgattacaccataagtgcagttgctgctccatga

SEQ ID NO: 3376 - protein, 443 aa, Physcomitrella patens subsp. patens
MGKTVEAIILWFRLIYLVVLFTPTLVVGVFINQTEGGLRRFWLHLLLRSLEAAGPAFIKWGQWASTRPDIFPADICDELSRLHMQAPRHSYAETRKIMEKAFRVPIETLFDDFECEPVASGSIAQIHRAVLKKPPGNGPPLIVAVKVRHPKVNDLIQKDFVIIRYLARISTALPGIKHLQLDKSVQHFAAFMTRQVDLTLEAAHLQRFIYNFRKSKDVSFPTPIYPYVHPTVLVETYEEGLSVAKYVNSGPLTKTHSQLANIGSSCLLKMMLQDNFIHGDLHPGNIFVRFVDNVPKIVLLDVGMTAELNSHSRAVMLQLFKAVASKNGRDVATYTLQFSDDQTCPDPEAFKQAVDDKFKEYLSIRGTAKNTGECMTELFDQIRKHHVNMDGDVCTVMVTTLILEGWQRKLDPDLDLFKILGDMLMAAEYAIPFDYTISAVAAP

SEQ ID NO: 3377 - DNA, 1479 bp, Physcomitrella patens subsp. patens
  CDS (1)..(1479)
atgattgccgtaattgtaggcgaggctactttagcccatcagagtgctgcaggagtagagtccttcccagctcgccaggacttgagtcagccttcacatcctgtacacattgtttccctcgtattgactctgttagaactcgttttattagtaattagagcgacgtatctagcagtcttgtttacgccagctattgttttagccccgttcgcagattcctttggacccaaattccggaaaagatggatatctttagtacatttctccttggaacatgggggcgcggctttcattaagtggggacagtgggcagctgctcgaccagacttgtttccaagagatctttgtgcgcagctcacaaagcttcattctaaggcccctgctcacaagttttctcaaaccaagcaaatcattgaaggtgcgttcggcaggagattagacgaaatttttgaggattttgaagaggagccagtagcatcggggagtatcgctcaaatccaccgggctgttctaagatttcgatatccaggtcaaatgtccaagccaatggtggttgcagttaaggtgcgacatcctggtgtcagcgaagagattcgtcgagattttactataatcaattggtgtgccaagatatccaatttcataccaggtctagcgtggcttagacttgacgaaagcatacaacagtttgcagtcttcatgttgacacaggttgacctggcaagggaagctgcccatttaagtcgtttcatttacaactttcgcaggtggaaagatgtttcttttcctaagccgttgtatccattggtacacccagccgttttagtggagacttttgaacaaggagagagcgtatcacgttttgtggacaggcgtggaaaaaatcgcttgaacagcgctctggcttctatcggaactcatactctgttgaagatgctcctcgtggataacttcgttcacgccgatcttcaccctggcaacatcttggtgcgtatggatcctcccaacaagcagagttttcagtcccgccctcatgtggttttgcttgatgtgggtatgattgcagagctgaatgctcaggatagatatactttattggattttttcaaagcagtagctcagaaggacggcaagaaagcagctgagtgcacgctcaaattttcacggtcccagaattgcccgaatcctagcgcctttattgatgatgtagaaaaagtattccagttttggaacacggaggaagggaatgcactgcatacaggagattgcatgcaggagttactggagcaagtccggcgtcatagagttaacatagatggtgatgtatgcactgtcatggtgaccacccttgttctcgagggatggcaacgaaaactggatccggaattgaacattatggatactctgcgtcaattacttttcaaagcagactgggtaaattcgttgtcatacacaattgatggagtaatggctccctga

SEQ ID NO: 3378 - protein, 492 aa, Physcomitrella patens subsp. patens
MIAVIVGEATLAHQSAAGVESFPARQDLSQPSHPVHIVSLVLTLLELVLLVIRATYLAVLFTPAIVLAPFADSFGPKFRKRWISLVHFSLEHGGAAFIKWGQWAAARPDLFPRDLCAQLTKLHSKAPAHKFSQTKQIIEGAFGRRLDEIFEDFEEEPVASGSIAQIHRAVLRFRYPGQMSKPMVVAVKVRHPGVSEEIRRDFTIINWCAKISNFIPGLAWLRLDESIQQFAVFMLTQVDLAREAAHLSRFIYNFRRWKDVSFPKPLYPLVHPAVLVETFEQGESVSRFVDRRGKNRLNSALASIGTHTLLKMLLVDNFVHADLHPGNILVRMDPPNKQSFQSRPHVVLLDVGMIAELNAQDRYTLLDFFKAVAQKDGKKAAECTLKFSRSQNCPNPSAFIDDVEKVFQFWNTEEGNALHTGDCMQELLEQVRRHRVNIDGDVCTVMVTTLVLEGWQRKLDPELNIMDTLRQLLFKADWVNSLSYTIDGVMAP

SEQ ID NO: 3379 - DNA, 2022 bp, Coprinopsis cinerea okayama7#130
  CDS (1)..(2022)
atgctcagagctgcaagaataccaaggctcgttcgtagcccccgcttcctatggcttgcagcacccctcgtcgtcggtggcggcgtcctcgtcatcaccagacagcctcagaccctgcaacatagcgacattctcagctcaccggctctcataccgcgtcgggctgcactcaaccccacgattctgtcaccttcagaagacaatcttactctcaagtccagcattctcgagctgctccgcgaacatgtgtgggagccaatacgtacagcagttcgttttctgcgcctattcgcgctgttctttcctgtgatcctctcgagtccaatgcttctcgtcggccgaccaatgaaagagtacaaaggagatagatggggagctgtttggtggtacggttaccttgtacagcagatggaagcagctggcccgacattcatcaagttggcccaatgggctgcatccagagtcgaccttttcccccctatcttgtgcgaacggctcggcgcccttcattcccagggaactcctcacccgttctctcacacaaagaaagtcgtcgaagccgtcttccagcgcccattcgatcaggtcttcgaggaatttgatcaaactccaattggatcaggtgccattgcccaagtttatcgcgcaactctcaagcgggacctcattcctccttcatatcatggccccaggcgcacccgccaggttggtggtgcacttggtcccatcattttggaggaccctcccccttctgcgccgaccgcctcggttgctatcaaaattcttcaccctcgagtggaaaagaccatctcccgggacctagccatcatgcatttcttcgcatcatgtatctccctgctccctggcatgaagtggctttctcttccagaggaagttttggtcttcggcgagatgatgaatcagcagttggatttgaggcacgaagccgacaatctcattaccttcgaagccaatttcgccccgaggaaggttcccgtcaccttcccgcggccattaaagatctggtcgagtaaagatatactcgtcgaggaatatcagaacgccttgcctctggaaacatttttacgaaatggcggtggcccttacgactatcagattgcgactgttggtttgaacgcgtttttgaccatgctgttactggataatttcgtccattccgacctccaccctggaaatatcatgatcaagttcagcaagccccctacaactcgaattctcctccagaatctgtacaaccatttcttccctagctctgtcgatcaatctacctccgatgtgtcgtcggcctcactaatgatcccagcggattactcccaatccgatgagattgtcgccaggctacgtaaagtctccaattcgccagatgaatggagccgggagctactcaaactccactcgggaggatacgtccccgaaatcgtcttcatagatgccggactcgttaccactctcaacgacaccaacagaacgaacttcctggacctcttcaaagctgtggccgaattcgatggatacaagaccggtcagctcatgatcgagcgaagccgaacgcctgaactggccgtggacaaggagacgtttgcgttgaagatgcagcacctaattctcagcatcaagcgcaagacgtttagcctgggacagattaagatcgccgaccttctaacggacgtgttgaagaacgttagaaagcatcgggtgaagatggagcccgactttattaacaccgtcatttccattctgttgttagaaggtatcgggagacagttggatcccaagatggacttgtttgcgagtgcgttgcccattctccgccaactgggagggcaaatggcgatggataccaaggtggagggactgcctagtgccaaagatcttccaacgagcgatcttgcggcgttgttaaaagtgtgggtgtggatagaagcgaggagttttatttctggcgcattggtggatatggatgcgttaattcagcgggattggttaaccccgaatatttag

SEQ ID NO: 3380 - protein, 673 aa, Coprinopsis cinerea okayama7#130
MLRAARIPRLVRSPRFLWLAAPLVVGGGVLVITRQPQTLQHSDILSSPALIPRRAALNPTILSPSEDNLTLKSSILELLREHVWEPIRTAVRFLRLFALFFPVILSSPMLLVGRPMKEYKGDRWGAVWWYGYLVQQMEAAGPTFIKLAQWAASRVDLFPPILCERLGALHSQGTPHPFSHTKKVVEAVFQRPFDQVFEEFDQTPIGSGAIAQVYRATLKRDLIPPSYHGPRRTRQVGGALGPIILEDPPPSAPTASVAIKILHPRVEKTISRDLAIMHFFASCISLLPGMKWLSLPEEVLVFGEMMNQQLDLRHEADNLITFEANFAPRKVPVTFPRPLKIWSSKDILVEEYQNALPLETFLRNGGGPYDYQIATVGLNAFLTMLLLDNFVHSDLHPGNIMIKFSKPPTTRILLQNLYNHFFPSSVDQSTSDVSSASLMIPADYSQSDEIVARLRKVSNSPDEWSRELLKLHSGGYVPEIVFIDAGLVTTLNDTNRTNFLDLFKAVAEFDGYKTGQLMIERSRTPELAVDKETFALKMQHLILSIKRKTFSLGQIKIADLLTDVLKNVRKHRVKMEPDFINTVISILLLEGIGRQLDPKMDLFASALPILRQLGGQMAMDTKVEGLPSAKDLPTSDLAALLKVWVWIEARSFISGALVDMDALIQRDWLTPNI

SEQ ID NO: 3381 - DNA, 2073 bp, Gibberella zeae PH-1
  CDS (1)..(2073)
atgagagctggccctttcataggccgctttttcgtgcatccgggcctccgaacatgtccgaatgtcaggccaaacatctcgatccttagccgtcgattcgcttcccaaagctcacgccaccctcgatttacaaaatggtctacacctacctcgagaagaatagccttgcaagcatctggcggtgcggtggcactaggaacagctgcctttgttgaattatcgcaacaggaaaacggcaatgatcaagaaaccggagaaaagcgcatgctcgaagcgtcgcgagctgaagtgcgaaagggcgttcgagctgagtcgcgaggtcttacacgagtgggagagcgtatcaaatacttgattgatcttctgatcatcgaacctgtgtgcaccggatttcgttttctgcagcttgtcgttatcttcgtaccagtcattatcacgatccctgccatttactttggaagccgacgtcccgatagagataatgagcgatcagggacgctctggtggtatggctttctggtcaatgagatggaactagctggcccagcctttatcaaactcgggcaatgggctgcctcacgaaccgacatcttccccacggagatgtgtgagatcatgtccaaacttcactcaaatgcgccagctcattcgctccatgctacgcgcgtgaccgttgaagctgcatttggtggcctcccctttgaggagattttcgaagagttccacgagaaacctcttggcgttggcgccattgcgcaggtttacaaggccaaattgaagcctgggctggccaaaccagaggaagccgaactgcacgattcatatcatttagcccagaacgtgaagcgcaacgttgacacggtcctaaagagctcaccacaaaggataccgtcatcatacgttgcaatcaaggtgctacatccccgtgtagagagaacagtcagaagagaccttcgcatcatgggcttctttgcctcactcctcaaccttatcccaaccatcgagtggctttcattaccggacgaggtaactcagtttggagagatgatgaagctgcagctcgatctccgtatagaggccgcaaacctggcgactttccgaaagaactttaaggatcggtccactgcttggtttccatacccttacacagagtacacaactcgcaacgttctgattgaggagtatgcccagggtatcccattggcagacttcatggagaatggcggtggcgtcttccaacacgatatcgccgatgagggtctcgatgctttccttcgtatgttgctgcttgacaactttgttcacgcggatttgcatcctggcaacatcatggtacgattctaccaatcagctcacccagacctccgcctacgaaaggcaatgaccaaggcccatcctgatgaggcagaagatgtcaccgagcaagtgctcgagcgacttcgaccataccgacatcgcaaggatacaaaagcatggcaggatgagctggccaaaatcgacgccgaggggttccgccctcaacttatctttattgatacaggactggtgaccgagctcaacgccgtgaaccgcgaaaacttcctcgaccttttccgcgccgttgctgagtttgacggctacaaagctggtcatctcatgtgcgagcgctgtcgccaaccagatgccgtgctggacaaggaagtgtttgccctcaaaatgcaacatctcgttctcagtgttaagagccgtactctggctctcggtaacgtcaaaattggcgatatcctgcaagaggtactcagcatggttcgaaaccaccatgtccgcctcgaaggcgactttgtcaatgtcgtaatcagcatcctccttctcgagggcattggccgcagcttgaatcctgatgtcgatctactcagcagttcactaccaattctacgacagcttagcgctcagagtggaacaagtatggccaagcacggagacttctctatgttggtggtatggctgggattagaagccagacgttttatgcaggccagtattgaagatgtcgagcgatgtgtcaagtacgatcagctctctccgaatatataa

SEQ ID NO: 3382 - protein, 690 aa, Gibberella zeae PH-1
MRAGPFIGRFFVHPGLRTCPNVRPNISILSRRFASQSSRHPRFTKWSTPTSRRIALQASGGAVALGTAAFVELSQQENGNDQETGEKRMLEASRAEVRKGVRAESRGLTRVGERIKYLIDLLIIEPVCTGFRFLQLVVIFVPVIITIPAIYFGSRRPDRDNERSGTLWWYGFLVNEMELAGPAFIKLGQWAASRTDIFPTEMCEIMSKLHSNAPAHSLHATRVTVEAAFGGLPFEEIFEEFHEKPLGVGAIAQVYKAKLKPGLAKPEEAELHDSYHLAQNVKRNVDTVLKSSPQRIPSSYVAIKVLHPRVERTVRRDLRIMGFFASLLNLIPTIEWLSLPDEVTQFGEMMKLQLDLRIEAANLATFRKNFKDRSTAWFPYPYTEYTTRNVLIEEYAQGIPLADFMENGGGVFQHDIADEGLDAFLRMLLLDNFVHADLHPGNIMVRFYQSAHPDLRLRKAMTKAHPDEAEDVTEQVLERLRPYRHRKDTKAWQDELAKIDAEGFRPQLIFIDTGLVTELNAVNRENFLDLFRAVAEFDGYKAGHLMCERCRQPDAVLDKEVFALKMQHLVLSVKSRTLALGNVKIGDILQEVLSMVRNHHVRLEGDFVNVVISILLLEGIGRSLNPDVDLLSSSLPILRQLSAQSGTSMAKHGDFSMLVVWLGLEARRFMQASIEDVERCVKYDQLSPNI

SEQ ID NO: 3383 - DNA, 1821 bp, Candida glabrata CBS 138
  CDS (1)..(1821)
atgctgttaaatttaattaagtcgcgagctaaagttacaactgctctggctaaagtacgagtggtcggtcgtcagaggcggttcttgataagtcctcttacaactgcgagcatagctactggtgctatatcattatcgatttatcataatcgtagggagcatttgctaaatgaaactttagaaccggatccgacaggagatacatttgaaatgggtttatatattgcgtcggagaaagagcgggaaactcttgctgcaagtggtaagctagacgttatcagaaagtctaggtcgctgcttgttagaagtatactaaaattatgggttgttctagatgataatataattgaacctgtcttgacagtttgtaggttcttagaacttatgggattgtttctacctgttttttctctttacccaatttgttggttaggaagaaggatcaaattaaatgatgatatcacagatacaagaggttccataatatggtgtaaattgattagaattgctttagaactggctggtccaagttttatcaagctaggtcaatgggcaggttccaggacagatatattctcagagacattgtgctacgagctaggtaaattgcacagcaaggtgagaccccattccatagaatacagtaagaaaatgataacctcttcatttgaagtagatgacttcgatgaaatatttgatagtttcggagaaaaaccactaggtgttggtgcaattgcacaagtccatgtagggaaattaaatgatgcattttacaacaaatatagtaataaaacaccagaaaataataaatggtgtgcgataaagattattcatcctagggtaagaaatcaaatatacagagatttgaaaattatgaaattttttgcctgtgtaattgatggtataccaaccatggagtggctttctctgcctaatgaagtcgaacaattctcaatattaatgaagctacagttagatctacgtatagaggccctgaatctcaaaaggtttaatgagaattttaaagatgcaactcaagttaaatttgcaactccgtatctagagttgtcaaatagggacgttttatttgaagaatatttacatggcttcccgatggaggatttcttaaaagtgaagagacatatcaaagatgatgatctttgtaggagagtaagtgacccatttgtcgaagctttcctccagatgttaatccgtgatgattttgttcatgcagacttacatcctggcaatgtcatgattaggtttgtcaagacgaataaatacggaactcagataatctcatctgaggaatcatcttataacatctcgcacacattaagagaaaaatggaggaacaaagactctgatttgataccatatctgaaatcggcactcacaacatacacaccacaaatatgttatatcgataccggcctggtgacagaattgaatgataggaaccgtgttaattttatagctctatttaatgcattagcacaatttgatggctacagggcaggtgaattaatgattgagaggtctcgtacacccgagactgcaatagataaagatctatttgcactaaaagtggaaaaattagtagataaagtcaagcaaaggacttttacattggggaatgtctcaattggagatcttcttgaccaaatgctgagaatggtcagatcacaccacgttagaatggaaggtgactttgtatctgttgtggtggccattttactgttggaaggtattggtaggcaactggatccagacctggatttgttcgagaggttcgtattttattattctcttcatttttaa

SEQ ID NO: 3384 - protein, 606 aa, Candida glabrata CBS 138
MLLNLIKSRAKVTTALAKVRVVGRQRRFLISPLTTASIATGAISLSIYHNRREHLLNETLEPDPTGDTFEMGLYIASEKERETLAASGKLDVIRKSRSLLVRSILKLWVVLDDNIIEPVLTVCRFLELMGLFLPVFSLYPICWLGRRIKLNDDITDTRGSIIWCKLIRIALELAGPSFIKLGQWAGSRTDIFSETLCYELGKLHSKVRPHSIEYSKKMITSSFEVDDFDEIFDSFGEKPLGVGAIAQVHVGKLNDAFYNKYSNKTPENNKWCAIKIIHPRVRNQIYRDLKIMKFFACVIDGIPTMEWLSLPNEVEQFSILMKLQLDLRIEALNLKRFNENFKDATQVKFATPYLELSNRDVLFEEYLHGFPMEDFLKVKRHIKDDDLCRRVSDPFVEAFLQMLIRDDFVHADLHPGNVMIRFVKTNKYGTQIISSEESSYNISHTLREKWRNKDSDLIPYLKSALTTYTPQICYIDTGLVTELNDRNRVNFIALFNALAQFDGYRAGELMIERSRTPETAIDKDLFALKVEKLVDKVKQRTFTLGNVSIGDLLDQMLRMVRSHHVRMEGDFVSVVVAILLLEGIGRQLDPDLDLFERFVFYYSLHF

SEQ ID NO: 3385 - DNA, 1809 bp, Kluyveromyces lactis NRRL Y-1140
  CDS (1)..(1809)
atgaggttttactttaatgcgttccgctctagagtgaactccagggtgtttttcctcaaaggtttaagaattacaccgtttcttctgtcgcctatagtcccactttcgatgcaatggtttagaggaccgttattgaacaattcaacggcgctaatacccgataaaaaaggggatactttcgagatgggcttatacatttcttcacagaagcaattacaggaagaagccgaaaaagagcgtgaaagaattataactactagtgttatgcccagtttttttaagaggattttgtatcgcatcaatgatgttattatagaaccggttttaacattgcttcgatttctagaactttcatccatattcattccgttgttaataatatatccaattacatgccttggacatcataaaacgctaaaggttgattcgaatagagttgtgaaggagacatcaggttcccttttgtggtttaaacttctaagaaaggctttagaattcgctggtcctacattcataaaattaggtcaatgggcaggatcccgtactgatattttctccgagggtttatgcgcagagttggggcgcctacacagcaatgctaaacctcatgcgttgaaatttacaaaagaagccattgttaattccttagataggaaatatgagttcgatgatatatttgatgaatttaacgaaaaacctgttggatgtggtgccatcgcccaggtctacataggaaagttaactgaattaatgatgaagaactttgatattaaaacggatagtaggtattttgcagtgaaagtggttcatccaaacgtaccgaaaaagatagaccgtgatttaaaaataatgactttcttcgccgatatgatcgactctgtacccaccatggaatggttgtccttaccaaatgaagtggagcagttttccatattgatgaagttgcaacttgacctacgtatagaatgtcagaacttgcagaagttcaatgataattttgctgacaatccaagagtaaagttcccagtcggcgctatggatttatcttctcgttatgtactttttgaagagtatattcacggattcccaatggagaaatttttatcgagtaaagatggtttaaagagagtcgacctttgtagaaaagtcagcgatccatttatcgaggcttttttgaaaatgttgattctggatgatttcattcatgcagatttgcatccggggaatgtcatgattcgtttcatgaaattgaataaacaagaaacaaaggtagtatcttctgaaaaagaaatgtttcaaattgtgcacaagttaagagcaatgtcaagagacaacgaccctgaattcattccggagatgaagagagtatttgaggaatatgagcctcaggtatgcttaattgatgcaggacttgttaccgagttgaacgatcgcaatagagtgaattttattgcactatttaatgcgttggccaaatttgacggttatcgagcaggtgagctaatgatcgaacgttcacgtacaccagaaactgcgatagacaaagatttatttgcattgaaagtggaaaaattagtcaataaagttaagaagcaaacattcactttgggcactgtgtcaataggagaacttttggataaaatgctaggaatggtaagacagcatcacgtaagaatggaaggtgatttcgtatctgtcattgttgctattctattgttagaaggaataggtagacagcttgatcctgaaatggatctctttgcaaggttcgtattatttgtcttaatgaatggattttcatccacttga

SEQ ID NO: 3386 - protein, 602 aa, Kluyveromyces lactis NRRL Y-1140
MRFYFNAFRSRVNSRVFFLKGLRITPFLLSPIVPLSMQWFRGPLLNNSTALIPDKKGDTFEMGLYISSQKQLQEEAEKERERIITTSVMPSFFKRILYRINDVIIEPVLTLLRFLELSSIFIPLLIIYPITCLGHHKTLKVDSNRVVKETSGSLLWFKLLRKALEFAGPTFIKLGQWAGSRTDIFSEGLCAELGRLHSNAKPHALKFTKEAIVNSLDRKYEFDDIFDEFNEKPVGCGAIAQVYIGKLTELMMKNFDIKTDSRYFAVKVVHPNVPKKIDRDLKIMTFFADMIDSVPTMEWLSLPNEVEQFSILMKLQLDLRIECQNLQKFNDNFADNPRVKFPVGAMDLSSRYVLFEEYIHGFPMEKFLSSKDGLKRVDLCRKVSDPFIEAFLKMLILDDFIHADLHPGNVMIRFMKLNKQETKVVSSEKEMFQIVHKLRAMSRDNDPEFIPEMKRVFEEYEPQVCLIDAGLVTELNDRNRVNFIALFNALAKFDGYRAGELMIERSRTPETAIDKDLFALKVEKLVNKVKKQTFTLGTVSIGELLDKMLGMVRQHHVRMEGDFVSVIVAILLLEGIGRQLDPEMDLFARFVLFVLMNGFSST

SEQ ID NO: 3387 - DNA, 2013 bp, Debaryomyces hansenii CBS767
  CDS (1)..(2013): transl_table=12
atgttaaacttattgagacaacctgttggttcgggtgtcataatacgaagcactaagcgtcagatagcgcaaaatatcaaatgttccatcaaaaagagacaattttccacgcagcaatatcaaattcgtagttcgaattttataaggggtggtcttattggtttaggaggcgcaaccataacaactatactacttcggtcaacggtacttaatgatattgcacctatagatacgacgattcacgaattaaaccccgtaaaaggagcagaaacttatgaaaatggactttatgaagcatcccaaagagaagaaatcgaacaatataatgattatcgccatagcaaagtacgcacgggaaataagctaaagcagatattctactacatcaaattttctatcgatgactatttaattgatccaataattacttttggaaggtttctagaattatccttccttttcgttcctgtgttaatcagttgtcctatttgctggtttgggcacaaagatagatccactggagagaatattagatcgggagctaagctctggtatagatatttaagatggtcgactgaaaaggcaggggcatcatttattaagctaggccagtgggctgcatcaagaacagacattttctcaaaagaaatgtgtgacgaattaagcaatttgcattcaaacgcaaaagctcattcactaaaagatacaattaaaattgtgagtaagagttttgaagatttacctttcgatgaaatatttgatgaatttaatgagaagcctgttggtgtgggagccattgctcaagtttataccgggaagttatctaataaagcattgaataaggttagatccggtggtgacttggaagaaaaggtaaatcaacccagcaaaagtaaacaattcttagataatatattggttacagaacatggtgatccgttgacggcaaatcagttcgttgcaattaaagttttgcaccctaatgttgagataaaaattaatagagacttgaaaataatgaagttcttcgcaaacctgattaatatgattccaacaatggaatggttatcattaccagatgaagttgaacaattttccattctaatgagattacaattggatcttagaatcgaaggtttaaatttagcaagatttagaaataactttaaaaagagattagacatccatttccctaaaccttacttgaattttaccactagggatgtgcttgttgaagaatatatacatgccatacccatgagcaagcttctatcattgagtgataattatggaaagaacttgtcaaaggaagtcagtgataaaggtttagatgcttttttgaaaatgttaattcttgataacttcgtacatgctgatttgcatcctggtaatatgatgattcgtttctataagaatgagatgttcaaacatgaaagagaatacaagatcgtgaagtcaagtaacgaacatgaaacgaataaaataaccaatgaattactaagcttaggtgaagataatgaaaaatggtgcagcagattatctgaattgtacgaagatggttatcacgcagaaatatgtttcctagatgttggtttaattactgaattgaatcaccacgatagaataaattttatcgatttatttagagcgttatctgagtttgatggttacaaggcaggtgaattgatggttgagagatctaggactcctgaaactgtaatagacaaagaaatatttgcgttgaaggttgacaaattagttggtactatgaaggagagaacattcacgttaggtaacatcagtatcggagatttattggataaagttttaggcatggttagaactcatcatgttagaatggaaggcgatttcattactgttattgttgctatacttttattggagggaattggtagacaattgtacccagatttagatttatttgcaaggttcgtatatgctttactattcggattccccactgaaaatgaagttggtatatctttcatttga

SEQ ID NO: 3388 - protein, 670 aa, Debaryomyces hansenii CBS767
MLNLLRQPVGSGVIIRSTKRQIAQNIKCSIKKRQFSTQQYQIRSSNFIRGGLIGLGGATITTILLRSTVLNDIAPIDTTIHELNPVKGAETYENGLYEASQREEIEQYNDYRHSKVRTGNKLKQIFYYIKFSIDDYLIDPIITFGRFLELSFLFVPVLISCPICWFGHKDRSTGENIRSGAKLWYRYLRWSTEKAGASFIKLGQWAASRTDIFSKEMCDELSNLHSNAKAHSLKDTIKIVSKSFEDLPFDEIFDEFNEKPVGVGAIAQVYTGKLSNKALNKVRSGGDLEEKVNQPSKSKQFLDNILVTEHGDPLTANQFVAIKVLHPNVEIKINRDLKIMKFFANLINMIPTMEWLSLPDEVEQFSILMRLQLDLRIEGLNLARFRNNFKKRLDIHFPKPYLNFTTRDVLVEEYIHAIPMSKLLSLSDNYGKNLSKEVSDKGLDAFLKMLILDNFVHADLHPGNMMIRFYKNEMFKHEREYKIVKSSNEHETNKITNELLSLGEDNEKWCSRLSELYEDGYHAEICFLDVGLITELNHHDRINFIDLFRALSEFDGYKAGELMVERSRTPETVIDKEIFALKVDKLVGTMKERTFTLGNISIGDLLDKVLGMVRTHHVRMEGDFITVIVAILLLEGIGRQLYPDLDLFARFVYALLFGFPTENEVGISFI

SEQ ID NO: 3389 - DNA, 1986 bp, Yarrowia lipolytica CLIB122
  CDS (1)..(1986)
atgtttcgttgttgcttgaggactgttcctctgagggcaatgctacgtcctcgagcgatccactccatgaggccctctttcaccaacgctcgtcaagccaacttccgagttgctggaatggcgactggtctggcggcaggcttcgcagtgggctgctccatggtgctgaacgacgcgccgcaagagaaagatgacaagaaacaggacctcaccagagaagaaaagttctacatcgaatcccaacaacaaacagaaagcagaaagctccccgactatgaagacagttccaacaagctgtatgtcttcttcagacggttgttaacccgcctggaggtctggatctgggaccccattgccacgacctttcgattcttctacctttcgattctcttcgcccctgttcttcttactctgcccgtcatcctcatcggaccccgggacaaatccaaagacaacgaacgatacactgccatctggtggtatggcttcctcaccaagatgatggagcgtgctggagcctctttcatcaagcttggtcaatgggctgcctctcgaactgacatcttccctcctcagctctgtgccgagatgagcgaccttcattcgaacaacaaggcccattctctcagagtgaccaaaaagaccctggaaggtgcctttggcatgccttttgaggaaatctttgacgagttcgtggacaagcctcttggagtgggtgcaatcgcccaagtttacaagggtaagctgtcccagaaggcgttgaattccacgaagcagaagaagggcgaaagaagcccatctggttgggttgccatcaaagtccttcatccccgtgtttcccagattgtcgagcgcgacctcagtatcatgagattctttgctaacatcatcaatgcagttcccaccatggagtggctctcgctgcccggagaggttgaacagtttgccggtatgatgcgtctgcagatggacttgcagattgaaggtaagaacttggaggttttcaataagaactttcaagataaggcagacatccacttccctcacgcattcctggaattcactacccgagacgttctggtcgaagagtacattgacgctatccctgttcacttgttccttgagcgagccaaggatggtggtggattcgacaaggagattgctaacaagggtctagatgcgttcttacagatgctgctcattgataatttcatccatgctgatctgcaccccggtaacatcttcgttcgactctacaaacctgagtcgatgatgcatcatcttggtttcggcgaccacaacaacgccaatgaggactacattgagatgcagaaggtgaacgatcacctcaagagtctcaagcatgaccccgcggcgtgggacaaggagattgaaagactcaaggctgatggataccatgcccagctttgtatgattgatgctggtctcgttactgagctcaacgagctgaacagacgaaacttcattgatctgttcaaggctctggctgagtttgatggctacaaggctggtgatcttatggttcagcgttctagaactcctgagaccgtcatcgaccctgaaacatatgcccttaaggtcggaaagcttgttgctcagatgaagagccgaacattcaagcttggaaacttcaagattggtgatctcttgacgcaggtacttgccatggtgcggcaacaccacgtgcgaatggaacccgattttatcacagtcattctctccattctgctattagagggcatcggccgacagctgaaccctgacctggatctcttcaagaacgctattcccgttttgcgagagctcggaacccactctggagacggacgagctcttttcaacaacgaagacatgatgtctatgcttaaggtctggcttgcccttgagactcgacagttcatctccgcctcggtcgaggaagtaaaccagcaggtcaaatacgacggactatgccccaatgtctaa

SEQ ID NO: 3390 - protein, 661 aa, Yarrowia lipolytica CLIB122
MFRCCLRTVPLRAMLRPRAIHSMRPSFTNARQANFRVAGMATGLAAGFAVGCSMVLNDAPQEKDDKKQDLTREEKFYIESQQQTESRKLPDYEDSSNKLYVFFRRLLTRLEVWIWDPIATTFRFFYLSILFAPVLLTLPVILIGPRDKSKDNERYTAIWWYGFLTKMMERAGASFIKLGQWAASRTDIFPPQLCAEMSDLHSNNKAHSLRVTKKTLEGAFGMPFEEIFDEFVDKPLGVGAIAQVYKGKLSQKALNSTKQKKGERSPSGWVAIKVLHPRVSQIVERDLSIMRFFANIINAVPTMEWLSLPGEVEQFAGMMRLQMDLQIEGKNLEVFNKNFQDKADIHFPHAFLEFTTRDVLVEEYIDAIPVHLFLERAKDGGGFDKEIANKGLDAFLQMLLIDNFIHADLHPGNIFVRLYKPESMMHHLGFGDHNNANEDYIEMQKVNDHLKSLKHDPAAWDKEIERLKADGYHAQLCMIDAGLVTELNELNRRNFIDLFKALAEFDGYKAGDLMVQRSRTPETVIDPETYALKVGKLVAQMKSRTFKLGNFKIGDLLTQVLAMVRQHHVRMEPDFITVILSILLLEGIGRQLNPDLDLFKNAIPVLRELGTHSGDGRALFNNEDMMSMLKVWLALETRQFISASVEEVNQQVKYDGLCPNV

SEQ ID NO: 3391 - DNA, 2037 bp, Aspergillus nidulans FGSC A4
  CDS (1)..(2037)
atgaggatttccctccagcttcgctgtatccgtgcgacttgcggtagaaccccacaacttctcgcccgtctccctctgcctccaagccgccgcttcacgcagttgtcatgtccgcagcgtccaagtcagggccgtcagaaaggggttccgagaattggtgcagttatttttgcagcactcgctccaggcgcttttgtgaagattgcggaaacagaagatgacggtaaaaccggggaaagactgatgttggaggcttcgcgccaggagttcagagaagatgtccttgagaagacagaacaacgaatagggctcgggggccctgttgtagcttactggacatattatgtctacgacacaatagcgactggctttcgtttcgtccacctagtcatcatcttcctacctgtcatcctgacggcgcctacgatatggcttggaaggcgcatcaagaataacgacggggctcgcacaggcaccttgtggtggtatagttttcttgttagggccatggagcgcgcaggtcctgcttttatcaagcttgggcaatgggccgcatcacgtactgatattttccctcccgaaatgtgcgaaatcatgtcgtcattacactcgaatgctcccggccattcgttacatgaaacaaagcggataatagaaaaggcgttcagtggaatgccctttgaggatatcttcgaggaattcaacgaggaacctttgggagtgggcgccatcgcacaagtgtacaaggcgaagctcaagccgaatctggctaatcttgcagataaccagctaacctgtgagcctcagaacctaaggggcaagctcagaaaaaacgttgacgccttggtcaagagcacccccaggcgagttccgtcctcatacgttgcagtcaaagtactgcatcctcgcgttgagcgactaatccgcagggacctgcgtatcatgagtttctttgcttctttgcttaatgcggttccaaccatgcactggctgtcgttccctgatgaggttgctcagttcggtgagatgatgaagctacaactcgatctgcggattgaggccacaaacttgaaaatcttccgcgagaagttcagatcccgtaccacagcttggttcccgtatccgtatttggattatagcacccgcgaggtgcttattgaggaattcgcccagggcatacctctgtccacctttctggaaaagggaggagggaacatcatggttcgtttctatcagcctagcgagcttgatttgtctctccgcaagaagggccgcgcagatgaagcaccgactcttaaggaggtcgatgttgcagacgccatactcgcccggttgctgccacatgcagatgattcccaaaagtgggaaagggctctagaagagctcaacgcagaaggctaccgaccgcagctccttttcattgacacagggttagtaacacagctgaatgacaccaaccgcgcgaacttcttagccctcttccgagctgtcgccgaattcgacggccaccgcgccggtgaactcatggttgagcggtgtcgtcagccagaggaagtcatcgacccagacatattcgctttgagaatgcaaaatttagtcctcggcgtcaaatcacggacatttgcacttgggaacatcaagatcggcgatattcttagcgaagtgctatctatggtccggcgacaccacgtccgcttggaaggggactttgtcaacgtcgtcatctccattctcctcctcgaaggcattggccggagcatggatcctgatctcgatctctttaagaggttagcgccgatattccctgccttgctgctcgaaatcatcgagctgccacccgctcaaaaccccctcttttgtgcccttcccatcttacggaaactcggttccaatgccactttcctaaagacaattcggtcgggcgacacctcaatgcttcgcgtctgggttggtcttgaagctcgtggcttacttagggcgagcattgagagtgtggagaattgtgtgaagtatgatttactgtcgcctaatgtctag

SEQ ID NO: 3392 - protein, 678 aa, Aspergillus nidulans FGSC A4
MRISLQLRCIRATCGRTPQLLARLPLPPSRRFTQLSCPQRPSQGRQKGVPRIGAVIFAALAPGAFVKIAETEDDGKTGERLMLEASRQEFREDVLEKTEQRIGLGGPVVAYWTYYVYDTIATGFRFVHLVIIFLPVILTAPTIWLGRRIKNNDGARTGTLWWYSFLVRAMERAGPAFIKLGQWAASRTDIFPPEMCEIMSSLHSNAPGHSLHETKRIIEKAFSGMPFEDIFEEFNEEPLGVGAIAQVYKAKLKPNLANLADNQLTCEPQNLRGKLRKNVDALVKSTPRRVPSSYVAVKVLHPRVERLIRRDLRIMSFFASLLNAVPTMHWLSFPDEVAQFGEMMKLQLDLRIEATNLKIFREKFRSRTTAWFPYPYLDYSTREVLIEEFAQGIPLSTFLEKGGGNIMVRFYQPSELDLSLRKKGRADEAPTLKEVDVADAILARLLPHADDSQKWERALEELNAEGYRPQLLFIDTGLVTQLNDTNRANFLALFRAVAEFDGHRAGELMVERCRQPEEVIDPDIFALRMQNLVLGVKSRTFALGNIKIGDILSEVLSMVRRHHVRLEGDFVNVVISILLLEGIGRSMDPDLDLFKRLAPIFPALLLEIIELPPAQNPLFCALPILRKLGSNATFLKTIRSGDTSMLRVWVGLEARGLLRASIESVENCVKYDLLSPNV

SEQ ID NO: 3393 - DNA, 1992 bp, Candida albicans SC5314
  CDS (1)..(1992): transl_table=12
atgtttcgaatactaaagccatcaatacgaacacttccatttgtttccaaatcgacaatcagaaatgtatacaccaaaacaaatacgtttccaaaatttcccacttctcatagagcagtctttggaatatctattggagccttagcctcaattacggtatacaatcaacacattgataatgacgtgcatgcattagatacatccgttcatacgttaacaccatcaaagacttcagaaacatttgaaatggggttatatgaatcatcacaaaaggaagaatacaatcaatattatgggtatcgagagacaaagaaaaaacatccaagttggattattcgaacattttattatttgagatttgcaattgaagattatttagttgatcccatgtttacatttgtaaggtttattgaattaagttgtattttcgttcccgtattgttgatttcaccaatttgttggtttggaagaaggcatagatccgagagcgggaatttggtcagaactggggctacattatggtataggtacttgcgttggagtgctgaagttgcaggtgcttctttcattaaattgggacaatgggcagcatcacgtactgatatattcccagaagaaatgtgtaatgaattgggcagtttgcattctaatgcaaaggctcattcattggagttgacgaaaaaaattatttccaagagttttggcaatttaccatttgatgagatctttgatgaatttaaagaaaagccattaggagttggggctatagcacaagtttatcttggtaagctttcacccaaagtattagaaagagctaaaaaagatgaagataaacttgttaaacaattgaaattacaagctgaagacaaacaggaacaattttttgaaaacattgttgttacagaacacttggattcaaatgaatttgttgccattaaagtgttgcatcctaatgttgaactcaaaatcaaccgtgatttaaagattatgaagttttttgctaatgtaataaacattatcccaacaatggaatggttgtctttgcccgatgaagtcgagcagttttctatattgatgagactacaactagaccttagaatcgaggcactcaatttggccaaatttagagagaattttaaaagtagattggacattcatttccccaaaccatatttgaactttaccaccagggatgttcttgtggaagaatatattcatgctatcccattgagcaagcttttatcattgtcagagaattatggtaagaatttatctaaagaagttagtgataaaggtttagatgcgtttcttaaaatgttgattttggacaattttgttcacgctgatcttcatccaggtaatatgatggttcgcttttacaaaaatgaattatacagacataaaaaggagtacaagatagtgaaaacttctaatgagacggagacaaacaaaataacaaacgaattattgaaattgggcgacaacaccaatgcatggtgtgaaaaattgtctgaactatacgaacaaggatatcacgctgaaatatgtttcttagatgtagggctagtaactgaattaaacaaagaagatcgaattaactttattgatttattcagagcattgtcagaatttgatggatacagagctggtgaattaatggcagaaagatcaagaaccccagaaacagtattgaataaggagatctttgcattgaaagtggaaaaattagttgacagaatgaaacaaagaacattcacattaggaaatataagtattggtgatttacttgatcaagttttaggaatggttagaaaccatcatgtgagaatggaaggtgattttgttacagttgtggtggcgattttgttattagagggaattggaagacaattggatcctaatttggatttatttgcaaggtttgtatatgcactattatttggttttcctactgaagaaatggagcttttcagcttgtttttggtccagtag

SEQ ID NO: 3394 - protein, 663 aa, Candida albicans SC5314
MFRILKPSIRTLPFVSKSTIRNVYTKTNTFPKFPTSHRAVFGISIGALASITVYNQHIDNDVHALDTSVHTLTPSKTSETFEMGLYESSQKEEYNQYYGYRETKKKHPSWIIRTFYYLRFAIEDYLVDPMFTFVRFIELSCIFVPVLLISPICWFGRRHRSESGNLVRTGATLWYRYLRWSAEVAGASFIKLGQWAASRTDIFPEEMCNELGSLHSNAKAHSLELTKKIISKSFGNLPFDEIFDEFKEKPLGVGAIAQVYLGKLSPKVLERAKKDEDKLVKQLKLQAEDKQEQFFENIVVTEHLDSNEFVAIKVLHPNVELKINRDLKIMKFFANVINIIPTMEWLSLPDEVEQFSILMRLQLDLRIEALNLAKFRENFKSRLDIHFPKPYLNFTTRDVLVEEYIHAIPLSKLLSLSENYGKNLSKEVSDKGLDAFLKMLILDNFVHADLHPGNMMVRFYKNELYRHKKEYKIVKTSNETETNKITNELLKLGDNTNAWCEKLSELYEQGYHAEICFLDVGLVTELNKEDRINFIDLFRALSEFDGYRAGELMAERSRTPETVLNKEIFALKVEKLVDRMKQRTFTLGNISIGDLLDQVLGMVRNHHVRMEGDFVTVVVAILLLEGIGRQLDPNLDLFARFVYALLFGFPTEEMELFSLFLVQ

SEQ ID NO: 3395 - DNA, 2364 bp, Ustilago maydis 521
  CDS (1)..(2364)
atgcttcttcatctgcgcacgaaactggcgctggcgacggcttgccgtactatcaacaatgtctcttcgagttcgagcgttctgagcttgtcgccccggttgcttcttccgattcactacacttgcttcgtcggtgcaccttcgccgcttgctcagaagaccagtgtccgatcagcgtccttgttggcctctacaaggccggtcattcctcttgaccagcctttcagatctcaggtttcgcgcgctttcacccaaagctcgtccttcacgagctcatctcaatcatactctagagacagagctggtcgtatcgcctcgatagccattgttggtctaggtgccgctttcttgcttggtggattatggacgcaagaaccgcttcagtcagagtccgagctccgcattgaagcaaaaacgcaagtgtcttcagagcaccaaggctttgcacctccagtagaagaagatgacgaggatcttcggcgtcgtaactttgtcgtgcgagccttcatcaaagtcggcaatgtcatccatgccgtcatcattgagccgttcggcacgggcagacggtttatctaccttctgatcctattcctcccagtcattttcactgctccaatgctgctcgtcggaagtagacgagaaaaaggcaggaggcgaggaagaaaggttcgcaaggacgaggagggagatcgctggggtgccatctggtggtattccttccttgtcaagcagatggagcgcgccggtcccacttttatcaagctcgctcaatgggccggtagccgtcaagatcttttcccggacgagctctgccagcgactgggtcgtctgcactcgaacggaaagccgcactcattccgatacaccaagcgtgtcatcgaacgcattttccagagaccttttgacgagattttcgaagagtttggccatgagcccatgggaatcggtgctgtagcgcaagtatacaaggcaacgctcaaacacgacctgctacccccgggctacaagcgcgcaaagaaggaagctacccaggacgaagctacgcagaagctgtctaaaacgctagcactttcgtacgaagaagatattgcgcctccgcagattcccaccaacagcgtcgccatcaagatcctccatccccgcgtcgaaaagacgattgcacgagacatcaagatcatgcgcttctttgcacgtctgatcaacatagttcctggcgctgaatggctttcgttccccgaagaggtcgatgtttttgccgaaatgatgttttcgcaactcgatctgcgcaacgaagccaacaacctcagtcgcttcgaagacaactttgcgcgtcgaagatctgctatctcgttcccacgtccactcacccagttcagtacaaaacaggtgctcatcgaagagttcgaagacgccctaccgctcaaacattttttgcagttgggaggtgccaaattcgaccatcgcatagccaacctgggtctcgacgctttcctcaacatgctgctgattgacaacttcacccacgccgatttgcacccaggcaacatcatgatcaagttttacaagccctccaccgagtcgttgctctcggatctttttgcacgtatcttgagcaagtttgacagcgactatgcgcctggtcaccgcaaggcaccggctacaccggacgatcaggtggaccaaagcatcgtggagagattacgtccgctcaaacatgaccaagatgcatggttggacgagcttgaccgacttgatgcacaagggtatcagcccgagattgttttgctcgatgcaggtctaacggtcgaattgacgccgttgaaccgacgcaacttcctcgacctgttttcggccgtggctcaattcgacggtgcgctagctggccatctcatggtagagcgttgtcgcacacccgatctggtcgtcgacaaggacgtgttcgccatgaagatgcaagatctcgtgctcagcgtaaagtcgaaaaccttttcgctcgccaaaatcaagatttcggacgtgctcaacaaggtgctcatggcagttcgcgaacatcacgtaaagatggaggctgatttcgtcaatacggtcatctcgatcctgctgctagagggtattggacgccaattggatcccgatatggatctgttcaagagcgcactgccgatcttgcgtcacttgggcagggagttgcagcatcaggaaggaggaggcatgcacgtgccaaagaaagaagaactccgcagaatgttgcccatgatcaaggtttggatgtacatggaggcgcgggggatcttgagtgctttcacggatgcaaaggtgagcacggtggatgcctttatgcggtatggatggcactccgagtaa

SEQ ID NO: 3396 - protein, 787 aa, Ustilago maydis 521
MLLHLRTKLALATACRTINNVSSSSSVLSLSPRLLLPIHYTCFVGAPSPLAQKTSVRSASLLASTRPVIPLDQPFRSQVSRAFTQSSSFTSSSQSYSRDRAGRIASIAIVGLGAAFLLGGLWTQEPLQSESELRIEAKTQVSSEHQGFAPPVEEDDEDLRRRNFVVRAFIKVGNVIHAVIIEPFGTGRRFIYLLILFLPVIFTAPMLLVGSRREKGRRRGRKVRKDEEGDRWGAIWWYSFLVKQMERAGPTFIKLAQWAGSRQDLFPDELCQRLGRLHSNGKPHSFRYTKRVIERIFQRPFDEIFEEFGHEPMGIGAVAQVYKATLKHDLLPPGYKRAKKEATQDEATQKLSKTLALSYEEDIAPPQIPTNSVAIKILHPRVEKTIARDIKIMRFFARLINIVPGAEWLSFPEEVDVFAEMMFSQLDLRNEANNLSRFEDNFARRRSAISFPRPLTQFSTKQVLIEEFEDALPLKHFLQLGGAKFDHRIANLGLDAFLNMLLIDNFTHADLHPGNIMIKFYKPSTESLLSDLFARILSKFDSDYAPGHRKAPATPDDQVDQSIVERLRPLKHDQDAWLDELDRLDAQGYQPEIVLLDAGLTVELTPLNRRNFLDLFSAVAQFDGALAGHLMVERCRTPDLVVDKDVFAMKMQDLVLSVKSKTFSLAKIKISDVLNKVLMAVREHHVKMEADFVNTVISILLLEGIGRQLDPDMDLFKSALPILRHLGRELQHQEGGGMHVPKKEELRRMLPMIKVWMYMEARGILSAFTDAKVSTVDAFMRYGWHSE

SEQ ID NO: 3397 - DNA, 1650 bp, Legionella pneumophila subsp. pneumophila str. Philadelphia 1
  CDS (1)..(1650): transl_table=11
atgaaatcaattaagcaacttattcgtcttatacatatcaattatattttagccaaaaatggtctagataatgttgttgtgtctatcaaactgtttgctcctttacgttttatagtgtatttaaacccatggaactggcttcgcaaggagaaattaacgcgcggtgaagcgctgcgcaaatcgctggaggaactcggccccatcttcattaaattcggacaagccctttccacacgccccgatatacttcctgaagacatcgcaaaagaattaagtaaactgcaagacaaagttcctccattccccagccatatcgccatgaacatcattgaacaggcctataaacagtctgcctatgatgtttttgcccaatttgatccgatcgccctggcttccgcttccatggcacaagtacatgcggcaaccctgaagacaggggaaaatgtcgttgtaaaaatactaaggcccaatatgcgccggcttatagaacaagatttaagtatcatgtacaccatcgccgcattggctgaccgctattggcctgagggaaagcgcttcaaacccaaagagatagtcaaggaatttgaacataccttactggatgaactggatttaatgagagaagcggcaaatgccgctcaattgcgaagaaatttcaatcaatctccgatgttatatatacctgaaatctattgggattattgccatcataatatcctggtcattgaacgcattcatggcatacccgtgaccgatatagccagtcttagagatcacggcattgacattaaaaaactggccgagcgtggggtagaaattttctttactcaagtcttccgggattgtttttttcatgcagacatgcacccgggaaatatctttgtctcctaccaaaaccccaaagaccctcagtatatttgtgttgattttggcatcattgggactctgacagataatgacaagcgttatctggctgaaaacctggtcgctttttttaaccgtgactacaagcgcgtagcggaattacatgtggagtcaggatgggtatcgcgtgacacccctgttgcagaatttgaaagcagcataagaaccgtttgcgaacctatttttgaaaagccattaaaagatatttcctttggacaagtggttttccgtttattccaggttgccagaaggtttcatatggaagtgcagccccaactgattttgctgcaaaaaaccctgttggcgatagaaggtttgggcagacaactctatcctgaattggatttatgggctacagcaaaaccattccttgaaaaatgggtgcgggaacaaatggggcctaaagcattcattaaacgcttaaagcaaaatctgcccttttttaccgagcaactcccccatatgcccaaactgatttttgatatattggagatgaaaaaggatcagttgttaacagtccatgaactcacacgcttgcaatctgaaaataacaatcagaccatccaatggaagagtatgggactgggtgtatttttctcatttttatcattaggcgtcattagctattttgatttgctggattataatcatctcacaaccatcacgatagctggttctgttttagctggaatttttgtactcatcaaccgcaagataaggaactaa

SEQ ID NO: 3398 - protein, 549 aa, Legionella pneumophila subsp. pneumophila str. Philadelphia 1
MKSIKQLIRLIHINYILAKNGLDNVVVSIKLFAPLRFIVYLNPWNWLRKEKLTRGEALRKSLEELGPIFIKFGQALSTRPDILPEDIAKELSKLQDKVPPFPSHIAMNIIEQAYKQSAYDVFAQFDPIALASASMAQVHAATLKTGENVVVKILRPNMRRLIEQDLSIMYTIAALADRYWPEGKRFKPKEIVKEFEHTLLDELDLMREAANAAQLRRNFNQSPMLYIPEIYWDYCHHNILVIERIHGIPVTDIASLRDHGIDIKKLAERGVEIFFTQVFRDCFFHADMHPGNIFVSYQNPKDPQYICVDFGIIGTLTDNDKRYLAENLVAFFNRDYKRVAELHVESGWVSRDTPVAEFESSIRTVCEPIFEKPLKDISFGQVVFRLFQVARRFHMEVQPQLILLQKTLLAIEGLGRQLYPELDLWATAKPFLEKWVREQMGPKAFIKRLKQNLPFFTEQLPHMPKLIFDILEMKKDQLLTVHELTRLQSENNNQTIQWKSMGLGVFFSFLSLGVISYFDLLDYNHLTTITIAGSVLAGIFVLINRKIRN

SEQ ID NO: 3399 - DNA, 1512 bp, Neisseria gonorrhoeae FA 1090
  CDS (1)..(1512): transl_table=11
atgaaatggttgaaacgcctgacggtcattgtcgggactttttaccgctatcggctggcaggtctgtgcgtttcgctgatgggtagcggttggatatgcgctctgctgaaaatgatgccgcagtcgtccaaattgaaaaacgaaccgcctgccgtccgtctgcgccttgccttggaaagcctggggccgattttcatcaagttcgggcaggttttgtccacacgccccgatttgattccgcacgattacgccgtcgaactggcaaagctgcaagacaaagtgccgccttttgacgcgcggctttcgcgtgaacaaatcgaaaaatcgctgggtcagcccatcgaaaagctgtatgcggaatttgaaaccgagcccgtcgccagcgcgtccatcgcccaagtacacaaagcccgcctgcattcgggcgaacgagtggcggtcaaagttttgcgccccaacctcttgccccttatcgaacaagacttgtcgctgatgcgtttcggcgcggcttgggtcgaacgcttgttttcagacggcaagcgtctgaagccgcgcgaagtggtggcggagttcgacaaatacctgcacgacgaattggatttgatgcgcgaagccgccaatgcaggacaactcgggcgcaatttccaaaacagcaatatgctgattgtgcccaaggtgttttacgactactgcacaagcgacgtgctgacgattgaatggatggacggcacgccggtttccgacatcgccaaactcaaagcagacggcatcgatttgcacaaacttgccgattacggcgtggaaatctttttcacgcaagttttccgcgacggctttttccacgcggatatgcaccccggcaatattttggttgccgccgacaaccgctatatcgcccttgatttcggcatcgtcggtacgctgaccgattacgacaaacgctatctcgccatcaatttcctcgcctttttcaaccgcgattaccgacgtgtcgccaccgcccacatcgaatcgggctgggtgcctgccgacacgcgtgcggaagagttggaagcggcggttcgcgccgtgtgcgagcctgtgttcaacaaaccgatttcgcagatttccttcggcttggtactgatgcgcctgtttgaagtcagccgccgcttcaatgtcgaaatccagccgcagctggtattgctgcaaaaaacgctgctcaacatcgaaggcttgggccgccaactcgatcccgatttggacttgtggaaaaccgccaaaccgtttttggtaaaatggatgaacgggcaggtcggtcccaaagccctttggcgcaacctcaaaaacgaagccccagactgggcgcaaatcatcccttccctgccgcgcaaaatcaatgccttggtcgatgaggcgcgccggcaggaaatgcgcgatgcctatatccatttggtcaaagtgcagcagcggcaaagcctgtggctggcagcgatagcggttgttttgctgctgattttgcttttgaaatag

SEQ ID NO: 3400 - protein, 503 aa, Neisseria gonorrhoeae FA 1090
MKWLKRLTVIVGTFYRYRLAGLCVSLMGSGWICALLKMMPQSSKLKNEPPAVRLRLALESLGPIFIKFGQVLSTRPDLIPHDYAVELAKLQDKVPPFDARLSREQIEKSLGQPIEKLYAEFETEPVASASIAQVHKARLHSGERVAVKVLRPNLLPLIEQDLSLMRFGAAWVERLFSDGKRLKPREVVAEFDKYLHDELDLMREAANAGQLGRNFQNSNMLIVPKVFYDYCTSDVLTIEWMDGTPVSDIAKLKADGIDLHKLADYGVEIFFTQVFRDGFFHADMHPGNILVAADNRYIALDFGIVGTLTDYDKRYLAINFLAFFNRDYRRVATAHIESGWVPADTRAEELEAAVRAVCEPVFNKPISQISFGLVLMRLFEVSRRFNVEIQPQLVLLQKTLLNIEGLGRQLDPDLDLWKTAKPFLVKWMNGQVGPKALWRNLKNEAPDWAQIIPSLPRKINALVDEARRQEMRDAYIHLVKVQQRQSLWLAAIAVVLLLILLLK

SEQ ID NO: 3401 - DNA, 1626 bp, Carboxydothermus hydrogenoformans Z-2901
  CDS (1)..(1626): transl_table=11
gtgtttcctttaacaccaaagcacctttcaaggtttcgtgaaattgcccgtatttttactgaatttggttttggctttattttaacttatttaaaaaggccagcagcactggataaagtggaaatcaacgaataccgtttaattgaactggccgggaatttaagggaaatgttagaaaaattaggaccaacatttatcaaacttggacaagttttaagtacgcaaagagacttacttcccaagccctttcaagctgaactggaaaaattacaggatagagtaaccccggttccttttgaagttatagcttcatatattgagaagaacttgggctctcccctgcacgatatctttattgagtttgatgaaaatcccattgccagcgcttccatagggcaagtataccgggccaagcttaaaaacggaaaaaatgtggttgtaaaagtaaaacgaccgggggttgatgaactgattaaaactgacctgcaaattctatatcaaattgcttcctttattcaaaacaaaaccaactggggaaaaattaataaacctttgcgaatgtgggaagaattaaaatcaagcttggaaagggaattagattacaccggggaagcacggaatatagaaaatttcaggcaaaatataaaatataaaaaactaattattcccgaagtgttctggaactttaccaatgaaaacatcttagttttagaagcggtttacggtattaaagtaagtgaacgcttccagctaattgaaatgggtatcgatttggaccagttagctcgagatttagtggaaatttttattttgcagattttagaagacggctattttcatgctgatccccatccgggcaacattgcaataactccgctgggggacattattttgtatgactttgggatggtaggttttttaaatccgtggttaagggaaatactaatcactttattaataagtgtagtaaggaaggattttgcaaggatttccgagttattaattgaattaagtcaaagacaagacataattccagcggaaataaaaaaagatgttcgggaaattttaaatcgctattatttcgtcccattatcttctttatcgttaggagaattattaaaagagttattaaaccttgcccaaaagcacgaaataataattccaccggaaattgttttagtagcgaaaacaattattgctttagaaggaatagtgaagaatttaaacagtaacttatcggtagccgaattagcggagccgttagcaaccaatcttttacggaaacgaatttttaagtttccatcctttaaaaaagttgccttagatttatataacttagttgacaagctttttgctttgccaggaatgttagaaagtagtttagcaaacttagaaaaagctaaattcactctcaaaatagaagaacgtcaattagaaagacaagtaacttcgtttgctaaaagtattcagtttttagcaatagttatcttttatgcagcttattttttgggttctccggcaattttaaatgctcttccggcagaccagaaaggtaaaatctttatttttataactgttgtttattttaccggtgggtacattttatggaaaaagcatctgctttag

SEQ ID NO: 3402 - protein, 541 aa, Carboxydothermus hydrogenoformans Z-2901
MFPLTPKHLSRFREIARIFTEFGFGFILTYLKRPAALDKVEINEYRLIELAGNLREMLEKLGPTFIKLGQVLSTQRDLLPKPFQAELEKLQDRVTPVPFEVIASYIEKNLGSPLHDIFIEFDENPIASASIGQVYRAKLKNGKNVVVKVKRPGVDELIKTDLQILYQIASFIQNKTNWGKINKPLRMWEELKSSLERELDYTGEARNIENFRQNIKYKKLIIPEVFWNFTNENILVLEAVYGIKVSERFQLIEMGIDLDQLARDLVEIFILQILEDGYFHADPHPGNIAITPLGDIILYDFGMVGFLNPWLREILITLLISVVRKDFARISELLIELSQRQDIIPAEIKKDVREILNRYYFVPLSSLSLGELLKELLNLAQKHEIIIPPEIVLVAKTIIALEGIVKNLNSNLSVAELAEPLATNLLRKRIFKFPSFKKVALDLYNLVDKLFALPGMLESSLANLEKAKFTLKIEERQLERQVTSFAKSIQFLAIVIFYAAYFLGSPAILNALPADQKGKIFIFITVVYFTGGYILWKKHLL

SEQ ID NO: 3403 - DNA, 2085 bp, Oryza sativa subsp
  CDS (1)..(2085)
atggtgatctcatccccgccaacgaaccactcttctgcatcgctttgtacgattcgcccgagcctggatcccgccttcattgacacgcccgctgtccgggaacaccatgatgtcgaggtcagctccgcagctcaaaatctactgagcttattggtgcttaatttggtgcaatgtagaagtgtaaatggctttcctgttgcttccaggtttatgcaaatagggaagagcagaaaactagttcatgatgtattggttaactcgaaacccaatagtttcacagcacagaacattggatccaactttgcgttcggtttggcacatacaggcagggcctgtttgcacaggaaggttccgcatggaccgggcacgtcatccatgcttggaagagcaaaggagagtttataccggaatccagctgcaagaaacttttcagttctctcaacatgtagccagaatgcatttcatggtcaacttgcttggaagcaactcatgacaatcggttctcatgtaccaaaggcatctccgattttaagtagggttgcttgtgccattagcttggctgctactagatctaatttagttccttacctctttgctttcgttgctggggagataatgctagctcagaagaccagtgcagacggagagtacttaccaattcgtgatagtctttacacgcgtgctcaagatggtcgtatctatgtcacctccttgatattttcagcagtagagctggtcatcataatcttcagatcaatatatttggcattgttgttcactccaagtatactcatggccccatttgcagatactcttggcagtaagtacaggaaaacatggctccgtcttgtgcatcgtaccctggagaaagcaggtcctgcatttattaaatggggccaatgggctgctactcgccctgatttatttgaaagtgacctctgtgctgaattgtcaaaactacacacaaaagcacctgctcacagctttgcttataccaagaagactgttgagaaagcttttggtcgaaagctatctgatctttttgagaattttgaagaagagcctgttgcttctggaagtgttgctcaagtgcaccgagctggtttgagattccggtatcctggccagcatataaagcgtgtaacagttgctgtaaaagtaagacatcctggcgtaggagaatcaatacggagggatttcactatcattaatgcagtagctaaaatttctagatatattcctacattgaattggttgcggctggatgagagtgtgcaacagtttgctgtctttatgatgtctcaagttgaccttgcaagggaagctgctcatttgagccggtttatctacaacttccgaaggtggaaggatgtgtcttttccaaaacctctttacccacttgttcatcctgctgtattggttgaaacttatgagcacggtgagagtgttgcacactatgtcgatgacctcgatggacatgatcgaattaaaagcgcccttgcacatattggcactcatgctctcctgaaaatgcttctggttgataactttgttcatgcagatatgcaccctggaaatattttggtccgtgttatacaaccaaggaattcaaataacacccttttgaagtctaggccacatgtagtattccttgatgtaggaatgactgctgaactttcaagtaatgatcgtgtgaatttactggaatttttcaaggctgttgcacgccgagatggtcgtacagctgcagaacgtacactgaggttatcaaaacagcaaaactgcccaaatccaaaagccttcattgaggaagttgaacggtcgttttccttttggggaacctctgaaggtgatgctgtccacccagctgagtgtatgcaccagttgcttgagcaagtacggcgccataaagtaaacattgatgggaacgtttgtactgttatggtcactacattagttcttgagggctggcagcgcaagttggatccagattacaatgttatgaaaacattacaaactttactttttaaggaagactgggccaagtctcttcagtacacaatcgaagggcttatggcaccttag

SEQ ID NO: 3404 - protein, 694 aa, Oryza sativa subsp
MVISSPPTNHSSASLCTIRPSLDPAFIDTPAVREHHDVEVSSAAQNLLSLLVLNLVQCRSVNGFPVASRFMQIGKSRKLVHDVLVNSKPNSFTAQNIGSNFAFGLAHTGRACLHRKVPHGPGTSSMLGRAKESLYRNPAARNFSVLSTCSQNAFHGQLAWKQLMTIGSHVPKASPILSRVACAISLAATRSNLVPYLFAFVAGEIMLAQKTSADGEYLPIRDSLYTRAQDGRIYVTSLIFSAVELVIIIFRSIYLALLFTPSILMAPFADTLGSKYRKTWLRLVHRTLEKAGPAFIKWGQWAATRPDLFESDLCAELSKLHTKAPAHSFAYTKKTVEKAFGRKLSDLFENFEEEPVASGSVAQVHRAGLRFRYPGQHIKRVTVAVKVRHPGVGESIRRDFTIINAVAKISRYIPTLNWLRLDESVQQFAVFMMSQVDLAREAAHLSRFIYNFRRWKDVSFPKPLYPLVHPAVLVETYEHGESVAHYVDDLDGHDRIKSALAHIGTHALLKMLLVDNFVHADMHPGNILVRVIQPRNSNNTLLKSRPHVVFLDVGMTAELSSNDRVNLLEFFKAVARRDGRTAAERTLRLSKQQNCPNPKAFIEEVERSFSFWGTSEGDAVHPAECMHQLLEQVRRHKVNIDGNVCTVMVTTLVLEGWQRKLDPDYNVMKTLQTLLFKEDWAKSLQYTIEGLMAP

SEQ ID NO: 3405 - DNA, 1944 bp, Pichia stipitis
  CDS (1)..(1944): transl_table=12
atgcctttgaggtccttggtgtcccattcggtgaaaaccagcaatttttcaggtggcaagctgatcgtgaaagtattgttagtaggagttggttcatgtttgacagccaatttctactacagagggatcagcaacgatgtccaggcaattgaaacctcagtccatgagttgttaccgaatcctggagctgaaacctacgagttgggactctaccagtcctcgcagaaagaagaacatgatcgattggaacagcacaggtcacaacgattgaaccatgacaatgtcgctgttagaataatttattatgttaaatatactatagaggattatgtcatcgatccgcttgtgtcggtagctcgctttgttgaattgtcgttgatatttcttcctgtgcttgttgcttctcctctctgttggtttggaagacgagatctccggaccggtaaaacggttcgctcgggtgcgcagatctggtttgcgtatttgagatggtctgcggaagtggctggtgcttcctttgtgaagttgggccagtgggctgcttcccgtacagacatatttccgaaggagatgtgcgatgagcttgggcagttgcactccgatggaacaccgcattccttggagctgacaaagaggatcatcagtggcagttttgacaatttgccgtttgaagagatcttcgatgcgttctttgaaaaaccgttgggagttggtgcaatcgcccaggtatatattggaaagttgtctgacaaagctttgtccaaagtcagaaagaccaccgactgggaaagccacctccagcaagaagaagatcttttgcaggatgagccatttttggataggatcctagtcacagaacacaacgatccattgacttctaaccagtatgttgccatcaaggtgttgcacccaaatgtagaaaccaagatcaatcgagacttgaagattatgaaattctttgcgaccgtcatcaacgtcattccgacgatggagtggctctctcttccggatgaagtagagcagttctcgatgttgatgcgtttgcaattggatttgcgtatagaagggttgaacttggccaagttcagacataacttccgtcaccgtttggatatacacttccccaaaccgtacttgggattcactaccagggatgttttggtggaagagttcattcatgcgattccgatgagcaaaatgctctcgttgctggacaacttcggcaagaacctatcgaaagaaatcagtgacaagggcctagatgcgttcttgaaaatgttaattcttgacaattttgttcatgctgatttgcaccctggaaatatgatggtgcggttctataagaatgaacttttcaagcacgagagggagtacaagatcgttaagtcgagtaacgaaacagaaacgaacagaataactaacgaattaatgaagttgggagacgactcagatgcgtggtgtgccaaattgagcgagttgtatgaagagggataccatgcagagatatgtttcctcgatgtagggttgatcacagagttgaatcacactgatagagtaaattttatagacctttttaaagccctatctgagtttgatgggtataaggctggagagttgatggtagaaagatcgcgaactcccgaaacggccatcaacaaggagatttttgccatcaaggtggagaagttggtagacagaatgaaggaaagaacatttaccttgggtaatatcagtattggagacttgttggaccaggtattgggaatggttcgtaaccatcatgtcagaatggagggtgactttgtaacggttatagtggctattttattactagaaggacttggaagacaattggatccagaattggatttgtttgcaaggttcgtatacgcgcttttgattggatttcccaccgagaatgaattttccatgtttttcatctaa

SEQ ID NO: 3406 - protein, 647 aa, Pichia stipitis
MPLRSLVSHSVKTSNFSGGKLIVKVLLVGVGSCLTANFYYRGISNDVQAIETSVHELLPNPGAETYELGLYQSSQKEEHDRLEQHRSQRLNHDNVAVRIIYYVKYTIEDYVIDPLVSVARFVELSLIFLPVLVASPLCWFGRRDLRTGKTVRSGAQIWFAYLRWSAEVAGASFVKLGQWAASRTDIFPKEMCDELGQLHSDGTPHSLELTKRIISGSFDNLPFEEIFDAFFEKPLGVGAIAQVYIGKLSDKALSKVRKTTDWESHLQQEEDLLQDEPFLDRILVTEHNDPLTSNQYVAIKVLHPNVETKINRDLKIMKFFATVINVIPTMEWLSLPDEVEQFSMLMRLQLDLRIEGLNLAKFRHNFRHRLDIHFPKPYLGFTTRDVLVEEFIHAIPMSKMLSLLDNFGKNLSKEISDKGLDAFLKMLILDNFVHADLHPGNMMVRFYKNELFKHEREYKIVKSSNETETNRITNELMKLGDDSDAWCAKLSELYEEGYHAEICFLDVGLITELNHTDRVNFIDLFKALSEFDGYKAGELMVERSRTPETAINKEIFAIKVEKLVDRMKERTFTLGNISIGDLLDQVLGMVRNHHVRMEGDFVTVIVAILLLEGLGRQLDPELDLFARFVYALLIGFPTENEFSMFFI

SEQ ID NO: 3407 - DNA, 2061 bp, Coprinellus disseminatus
  CDS (1)..(2061)
atgttcactggcaggcgtgctctcctcgccaccctgcgcggccctcgcgccctcctccaacgacaccctcggcgctggctcttcgtcctcccccttgctacaggcgccgtcctctatgccctcccgcagcgacccgagacgatcccaaagcacctttactcgtcgcccgccctgatccccgcacgagaagctgaactcgtccccaccattttctcgccctccgaagcacatctcgacgttccctcgcgcatcctcacctttctcagagaacatgtctgggagcccatcctcaccgccaagcgcttcgcctacctcttcttcctcttcgttccggtcatcgtctccagcccgatgctcctagtggggccccagagtaagcagtataggggcgacaggtggggtgcggtttggtggtacggcttcttcaccaggcggatggaagcggcagggccaacctttatcaaactggcccaatgggcggcgtcgcgagtggatctctttccacccatcctgtgcgagcgcctgggtgctcttcattcccaggggagaaagcatccgatcgagcacacgagaagggttgttgaacgagtgttcaaacgttcattcgaagaagtgtttgaagaattcgacgaagacccaatcggttctggggccattgctcaagtataccgcgccaccctgaagcaagatctcatccccccttcctatcacggtccccgacgcacccgcaagcgaatagcagacaccgtcggccctgtcatcctgcaagacccacctccagccccccctacgtcatgtgtcgccatcaagatcctccacccccaggtgtcaaagaccatctcgagagacctgtcaatcatgagcttttttgcaaagtgcttgaacgctctccccggaatgaagtggctatctctacctgaagaggtcgaggtctttggcagcatgatgtaccagcaactagacctccgccacgaagctgacaacctcattaccttcgagcagcatttcgctcctcgcaaagtccctgtcacgttccctagaccactaaaggtatggtcgacaccggagatgctcgttgaagagtatcaaaacgcgcttcccctggagctcttcctccgcaacggaggcggcccatacgacgagcaggtggccactgtcggtctgaatgcgtttcttaacatgctcctcctcgataactttgtccattccgacctccacccaggcaatatcatgattaagttcagtaaacccccaactaccggcatactcctcaagaatatctggaatcacctatttccatccgcacccaggcttgatctagaaacaggcacctttgagcctctctccccaatcatccccgccgactactcccagtcagacgagattgttggaaagcttaggtccctcgccaacaatccctcagcctggcacgcggaactggataaacttcatgtgagtgggtacgttcccgaaatcatcttcatcgacgctggcctcgtcaccaccctcaacacaacgaaccgcaagaacttcctcgacctattccgcgcggtagccgagttcgacggctaccgcaccggccaactcatgatcgagcgttctcgtacacccgagcttgcgattgaccaggaaacctttgcactcaaaatgcaaaacctcatcctctcagtaaaacgacgcactttctctctcgggcagatcaaaattgcggacctacttacggacgtgctgaagaacgtgcggacgcatcatgtcaagatggaaggcgacttcatcaacacggtcatttccatcttgttgctcgagggtattgggaggcagttggacccggacatggatttgttcgcaagcgctttgccaattctgaggcagcttggagggcagatggcgacgagagaggcgaaggatggggccttaagcgcccgggatttgcctaggagtaacctgggcgcgttgttgaaggtgtgggtatgggtagaggcgaggtcgttcataacatctgccgtgtcttcggatacggattggatggtcgagtcagattggttgacgcccaacatttga

SEQ ID NO: 3408 - protein, 686 aa, Coprinellus disseminatus
MFTGRRALLATLRGPRALLQRHPRRWLFVLPLATGAVLYALPQRPETIPKHLYSSPALIPAREAELVPTIFSPSEAHLDVPSRILTFLREHVWEPILTAKRFAYLFFLFVPVIVSSPMLLVGPQSKQYRGDRWGAVWWYGFFTRRMEAAGPTFIKLAQWAASRVDLFPPILCERLGALHSQGRKHPIEHTRRVVERVFKRSFEEVFEEFDEDPIGSGAIAQVYRATLKQDLIPPSYHGPRRTRKRIADTVGPVILQDPPPAPPTSCVAIKILHPQVSKTISRDLSIMSFFAKCLNALPGMKWLSLPEEVEVFGSMMYQQLDLRHEADNLITFEQHFAPRKVPVTFPRPLKVWSTPEMLVEEYQNALPLELFLRNGGGPYDEQVATVGLNAFLNMLLLDNFVHSDLHPGNIMIKFSKPPTTGILLKNIWNHLFPSAPRLDLETGTFEPLSPIIPADYSQSDEIVGKLRSLANNPSAWHAELDKLHVSGYVPEIIFIDAGLVTTLNTTNRKNFLDLFRAVAEFDGYRTGQLMIERSRTPELAIDQETFALKMQNLILSVKRRTFSLGQIKIADLLTDVLKNVRTHHVKMEGDFINTVISILLLEGIGRQLDPDMDLFASALPILRQLGGQMATREAKDGALSARDLPRSNLGALLKVWVWVEARSFITSAVSSDTDWMVESDWLTPNI

SEQ ID NO: 3409 - DNA, 2031 bp, Pleurotus djamor
  CDS (1)..(2031)
atgaatgtcttgatacgacgctccttcttcactcgcatccccgtccaccgcacaggacacctccgcctcaaaagggccgcactatggcttgtccccgcggctggcggcctcgctctgtccatctcttccaggccaagcaagccccaggatgtctttgcgtcccccgccatgctcccgtgtcgagaaaacatcgtcccaaccatcctctcgccagcagaaccagataagcacatcgcacgcaggctgctcgacctcctgaggtcctacatctgggagccagtcttgaccgcaaaacgcttcatctacctcttcttcctattcgcacctgtcatcatatcaagcccaatgctcctcgtagggaagccaaggaagcggctccatggcgaccggtggggggctgtctggtggtatggctttctcgtccgcagaatggaagccgcggggcctacctttatcaaactcgctcagtgggccggctctcgaacagacttgttcccttctcttctatgcatccgcctcggcacactccactcccaggcgaagcctcacgatctccaatacaccaaacaggtcatcgaaactgtctttcaaagaccctttgatgacgtctttgaagagtttgacgcaacccccattggtacaggtgccatcgcccaggtatatcgagctacgctgaagaaagacctcattccaccgtcgtatctgggtccacgccgccaacgccgcagcaagaatccaaccgctgcggctattgcacccgccattctccatgatcttcctccgtcggtacccacagctgctgtcgcgatcaaagtcctccatccaaaagtcgaaaagaccatatcaagagacttgcgtatcatgtccttcttcgcacatttcattactctgttccccggaatgcagtggttatctctacccgaggaagtggaggtctttggcgcaatgatgtttcaacaactagatctacgacatgaagccgaaaacttggttgcttttgaaaaccatttcgccccgcgcaaggtgcctatcggatttcctagaccactacaagtatggtctacgaaagagttgctcgtggaagaattcgagaatgccctgcctctcgaggtctttctgaagaatggtggaggcccattcaacgagcagatcgcgactgtgggcttggacgctttcctgaatatgcttctcctggataactttgtccactccgacctccacccagggaacattctcatcaagttctcgaagcctccgtctactcaagctctcctgaagaacctcgtatactctttgttcaacaaacctctagttgatccttcggcttccctcccggccaatcccaatccgacatcagacctctctgactccgacgaaattgtatcaaagttacgatcagtgatttcctccccacctgaatggaggaaagagctcgaatcagtgtacgaaaacggatacattcccgagatcgtcttcatcgatgctggtctcgttacgacactagacgccaaaaaccgcacgaatttccttgatttgtttcgcgcgatcgccgaatttgacggataccgcgccgggcatctcatggtccaacgctgccgcacaccagaactggccatcgatacggaaactttcgccctaaagatgcagcatgttgttctttctgtcaaacggaaaacattctcgttagggaagatcaagatttctgatattctccgcgatgtgttgaaggccgttagggagcatcacgtaaagatggagggggattttgtgaataccgttatttccattttgttgttggaggggattgggaggcagttggatcccgagttggatttgtttaagagtgcgttgccgatgttgaggcggttgggagggcagatggcgatgagcgatgcggtggggaagagtgcgaaggatcttccgaagagtgatttgggggcgtttttgaaggtgtgggtttggcttgaagcgagggagttcatctctgcttctattgtgaatgccgatgagatgataaaatatgattggtga

SEQ ID NO: 3410 - protein, 676 aa, Pleurotus djamor
MNVLIRRSFFTRIPVHRTGHLRLKRAALWLVPAAGGLALSISSRPSKPQDVFASPAMLPCRENIVPTILSPAEPDKHIARRLLDLLRSYIWEPVLTAKRFIYLFFLFAPVIISSPMLLVGKPRKRLHGDRWGAVWWYGFLVRRMEAAGPTFIKLAQWAGSRTDLFPSLLCIRLGTLHSQAKPHDLQYTKQVIETVFQRPFDDVFEEFDATPIGTGAIAQVYRATLKKDLIPPSYLGPRRQRRSKNPTAAAIAPAILHDLPPSVPTAAVAIKVLHPKVEKTISRDLRIMSFFAHFITLFPGMQWLSLPEEVEVFGAMMFQQLDLRHEAENLVAFENHFAPRKVPIGFPRPLQVWSTKELLVEEFENALPLEVFLKNGGGPFNEQIATVGLDAFLNMLLLDNFVHSDLHPGNILIKFSKPPSTQALLKNLVYSLFNKPLVDPSASLPANPNPTSDLSDSDEIVSKLRSVISSPPEWRKELESVYENGYIPEIVFIDAGLVTTLDAKNRTNFLDLFRAIAEFDGYRAGHLMVQRCRTPELAIDTETFALKMQHVVLSVKRKTFSLGKIKISDILRDVLKAVREHHVKMEGDFVNTVISILLLEGIGRQLDPELDLFKSALPMLRRLGGQMAMSDAVGKSAKDLPKSDLGAFLKVWVWLEAREFISASIVNADEMIKYDW

SEQ ID NO: 3411 - DNA, 1512 bp, Neisseria meningitidis serogroup A
  CDS (1)..(1512): transl_table=11
atgaaatggttgaaacgcctgacggtcattgtcgggactttttaccgctatcggctggcaggtctgtgtgcttcgctgatgggtagcggttggatatgcgctctgctgaaaatgatgccgcagtcgtccaaattgaaaaacgaaccgcctgccgtccgtctgcgccttgccttggaaagcctggggccgattttcatcaagttcgggcaggttttgtccacacgccccgatttgattccgcacgattacgccgtcgaactggcaaagctgcaagacaaagtgccgccttttgacgcgcggctttcgcgtgaacaaatcgaaaaatcgttgggtcagtccatcgaaaagctgtatgcggaatttgaaaccgagcccatcgccagcgcgtccatcgcccaagtacacaaagcccgcctgcattcgggcgaacgagtggcggttaaagttttgcgccccaaccttttgccccttatcgaacaggatttgtcgctgatgcgtttcggcgcggcctgggtcgaacgcttgttttcagacggcaggcgtctgaagccgctcgaagtggtggcggagttcgacaaatacctgcacgacgagttggatttgatgcgcgaagccgccaatgccggacagctcgggcgcaatttccacaacagcaatatgctgattgtgcccaaggtgttttacgactactgcaccagcgacgtgctgacgattgaatggatggacggtacgccggttgccgacatcgccaaactcaaagcagacggcatcgatttgcacaaactcgccgattacggcgtggaaatctttttcacgcaggtcttccgcgacggctttttccacgcggatatgcaccccggcaatattttggttgccgccgacaaccgctacatcgccctcgatttcggcatcgtcggcacgctgaccgattacgacaaacgttatctcgccatcaatttcctcgcctttttcaaccgcgattaccggcgcgtcgccaccgcccacatcgaatcgggctgggtgcctgccgacacgcgtgcggaagaattggaagccgccgtccgcgccgtgtgcgaaccggtgttcaacaaaccgatttcgcagatttccttcggcttggtgctgatgcgcctgtttgaagtcagccgccgcttcaatgtcgaaatccaaccgcagcttgtgctgctgcaaaaaacgctgctcaacatcgaaggcttgggccgccagctcgatcccgatttggacttgtggaaaaccgccaaaccgtttttggtgaaatggatgaacgggcaggtcggccctaaagccctttggcgcaacctcaaaaacgaagcccccgactgggcgcaaatcattccttcattgccgcgcaaaatcagtgcgttgattgatgaaaaccgccagcaggaaatgcgtgatgcctatatccatttggtcaaagtgcagcagcggcaaagcctgtggctggctgtgattgcggttgttttgctgctgattttgcttttgaaatag

SEQ ID NO: 3412 - protein, 503 aa, Neisseria meningitidis serogroup A
MKWLKRLTVIVGTFYRYRLAGLCASLMGSGWICALLKMMPQSSKLKNEPPAVRLRLALESLGPIFIKFGQVLSTRPDLIPHDYAVELAKLQDKVPPFDARLSREQIEKSLGQSIEKLYAEFETEPIASASIAQVHKARLHSGERVAVKVLRPNLLPLIEQDLSLMRFGAAWVERLFSDGRRLKPLEVVAEFDKYLHDELDLMREAANAGQLGRNFHNSNMLIVPKVFYDYCTSDVLTIEWMDGTPVADIAKLKADGIDLHKLADYGVEIFFTQVFRDGFFHADMHPGNILVAADNRYIALDFGIVGTLTDYDKRYLAINFLAFFNRDYRRVATAHIESGWVPADTRAEELEAAVRAVCEPVFNKPISQISFGLVLMRLFEVSRRFNVEIQPQLVLLQKTLLNIEGLGRQLDPDLDLWKTAKPFLVKWMNGQVGPKALWRNLKNEAPDWAQIIPSLPRKISALIDENRQQEMRDAYIHLVKVQQRQSLWLAVIAVVLLLILLLK

SEQ ID NO: 3413 - DNA, 2025 bp, Schizosaccharomyces pombe
  CDS (1)..(2025)
atgattccttctgcaaactctcgttttgctttcattattcaaagaaattatattcctgtcgttaactcgcagaacacaagatggaaaaggttatgcgggacacagtcagtttggtcaccatacaaaaaaaagcacgtactggttaatcgattgaagcatatatctttattccccaaacctatatttgcaagaaagtttacaacccgacaaaaaagtgaagaccagaagcaatggaggatactaaggattacatttcttgtcctcccttttacggtcggaggattatggattttatacagagtcaaaaatcgaaagaataatattttctcctttgacgaacttgaattagaagagagaagcaatcgacctcgttctatttttggaaaaataaaacaattttttaatattctcctcaggtcatttaatttatttattattttctctccaattattattaccttaccgtttatcgctcttatttctttcctgcatcttcgatctttgtcgtctttaaccgtatccatttggcttcgtttcctcgttactcaattagaaagagcaggagcaacgtttatcaagttgggacaatgggctgcttcacggacagatttgtttcctcctgctttctgtaaaacactgtccaaattacattcacatgtaacgccccacagccttgcctatactcaatcagtcatctgcaagacttataaagtggaatctatcgaggaaatttttgttaattttaacccaatacctataggtgttggagcaattgctcaagtctatacggctaccatcaagaaagcagctacgcagcaagataattcctactttacaagtatgctacaatctatagggtttcgacagaaaaatatctctgatgcgccagtgactcaagatgtagccattaaagttttgcacccgaatgttgaaaaatacatttctttagacttacaaatcttaggtttcttcgcaaaattaattaatttggtaccttcaatgaagtggctttctctgcccgacgaagttaaggtatttggggcaatgttaaaccagcaattgaatttacattatgaggcgcttcatctcaaccagttccgtcttaactttagaggaaatagatatgttgaatttccagctccctatgatgattacacgactaatcaaatcctactagaagactatatgccgggtatcccattaagcgcgttcctcaaacataagtcaggaccatttaacaagttgttagctaacacaggaaataatgcattatttcaaatgcttattgttgacaactttacacatgctgatcttcatccgggtaatgtccttgttaaattttacaaaggaatccctaaaacaatctttaatcaagataatgagattaatgactcaatttataaaattctaagtacatgttcgacggaggaatgggattctgctatggaagaattaaacatcttgggctatcgaccgactttagtatttttggatgctggattagtaacgaaacttagtacgcaggatcagaaaaattttttggatctgtttcaagccgtacttactttccatggctatgaggctggactgttgatggttgaaaggagcaggcagacagaacgcgttataaacaaagacatatttgctcttaaaatggaacatttgttgaatgaaattcaaaagagcacgctttcactgaaatcacttcaaataggaactatattacaagaagtaatgactatggcgagagagcatcatgttcgaattgaagcaaatttcgcaaatactgtgctatctatccttttagttgaaggcgctggacgccaactatatccagaaatggatctattaagtaatgctacaccatatcttcgttctgcttcatcgaaatccaatgtctcactcacaaacccaatggttcaattatggatagctttagaagctagacaatttttgcttttaagcacctctaaagaaacggtagaaaagtgggttaagtccgatatgatcgcacccaatatataa

SEQ ID NO: 3414 - protein, 674 aa, Schizosaccharomyces pombe
MIPSANSRFAFIIQRNYIPVVNSQNTRWKRLCGTQSVWSPYKKKHVLVNRLKHISLFPKPIFARKFTTRQKSEDQKQWRILRITFLVLPFTVGGLWILYRVKNRKNNIFSFDELELEERSNRPRSIFGKIKQFFNILLRSFNLFIIFSPIIITLPFIALISFLHLRSLSSLTVSIWLRFLVTQLERAGATFIKLGQWAASRTDLFPPAFCKTLSKLHSHVTPHSLAYTQSVICKTYKVESIEEIFVNFNPIPIGVGAIAQVYTATIKKAATQQDNSYFTSMLQSIGFRQKNISDAPVTQDVAIKVLHPNVEKYISLDLQILGFFAKLINLVPSMKWLSLPDEVKVFGAMLNQQLNLHYEALHLNQFRLNFRGNRYVEFPAPYDDYTTNQILLEDYMPGIPLSAFLKHKSGPFNKLLANTGNNALFQMLIVDNFTHADLHPGNVLVKFYKGIPKTIFNQDNEINDSIYKILSTCSTEEWDSAMEELNILGYRPTLVFLDAGLVTKLSTQDQKNFLDLFQAVLTFHGYEAGLLMVERSRQTERVINKDIFALKMEHLLNEIQKSTLSLKSLQIGTILQEVMTMAREHHVRIEANFANTVLSILLVEGAGRQLYPEMDLLSNATPYLRSASSKSNVSLTNPMVQLWIALEARQFLLLSTSKETVEKWVKSDMIAPNI

SEQ ID NO: 3415 - DNA, 1974 bp, Saccharomyces cerevisiae
  CDS (1)..(1974)
atgtcatttttaaagttcgcttatagaaactcttggcgatactatagcaagtccacacggcattttcataaaatacctataagacagttcataatacctacgtcaattgctttttatttgacacaaaattcgtttccaaaacaaaattgtttgatatacaatgattctctaaaaccggatcccaaaggtgatacttttgaaatgggcctctacgtttcctcagaaaacgaattgcaggaaaagcttaaatctttcaggtctgctaagatcactgaatcacgaaataaattaataagatatctaagaatcttttggttcggttttaatgataatattgttgagcctgtatgcacgattttaaggtttttagaaatttcagctatttttttacctcttctcctattataccccatatcatggtttggtcataaactcaaaattacggacaccaatataactgaaactcgaggttcattgatttggtgtcaactactgcgtaaagcattggaattggctggcccgagtttcattaaactcggacaatgggcaggatcgagaaccgatatattctctcacgcactgtgtcatgagttgggtaaattgcatagtaacgttacagctcactctctaagctttactctggaaaaactttctcaagcattaaaggttgacaagatcgaagatgcttttgatgaatttaatcgaacaccaattggagttgggtccatcgcacaagtttacgtgggtgaactatcccaaaagtacatcgataaatatgacaatatacaaattggtaaggatggaaatcgttggtgtgccatcaagatcttgcatccaaatgtaagatctcagatccggagagatttgaaaataatgaaattctgtgctgacgcaataaattggattccgactatggaatggctgtctttacccagcgaagtcgatcagttttccatattaatgaatattcagttggatctaagaattgaggcgttaaacctggaaagattcaatgagaactttaaaaattctattcaggtgaaatttcctaaaccatttctccccttgtcaaatagggatgttatgttcgaagagcatgtatatggtctttccatggaaaagtttttatctacgaagaagcaaattaacgacgttgaactttgtaaaaaagtcagtgatcccttcgttgacgcgtttctacaaatgctaattcttgatgattttgttcatgctgatttgcatccaggcaatgttataatcagatttgtgaagacgaacaaatacggcacaaacattatatcctccgaacttgaatcgtacagaataacgcacgacctgaggaagaagatagaggaggaccaagatcaggactttgttggaaaactgaagtctgtattaactaattacactccccaaatttgttttatcgatacaggaataattacagaattgaatgaaaaaaacagaattaatttcatagctctattcaacgcattggcccgatttgatggttatagagctggtgagttgatgattgagagatcaagaactccagaaacagctattgataaggaagtatttgcgtttaaggtagaaaagctagtggataaagttaaacaaagaacatttacattgggaaccgtctcaattggcgatttactcgatcaaatgcttagtatggtaaggtcgcaccatgttagaatggagtccgactttgtttccgtggtggtcgctattttacttctagagggtattggacgccagttagatccaaacttggacttatttgaaagttcgctgcctatattacgtgaattcgggtttaagcgggaagccaaaagtctcttgaaagatgcaagcacattatcaatgctcaagatatgggttggtttagaagtgcgtcaattaatgcatctctcgatgaagcaaatatacgatcttgtcaggactgatcaattgtgtcctaattattaa

SEQ ID NO: 3416 - protein, 657 aa, Saccharomyces cerevisiae
MSFLKFAYRNSWRYYSKSTRHFHKIPIRQFIIPTSIAFYLTQNSFPKQNCLIYNDSLKPDPKGDTFEMGLYVSSENELQEKLKSFRSAKITESRNKLIRYLRIFWFGFNDNIVEPVCTILRFLEISAIFLPLLLLYPISWFGHKLKITDTNITETRGSLIWCQLLRKALELAGPSFIKLGQWAGSRTDIFSHALCHELGKLHSNVTAHSLSFTLEKLSQALKVDKIEDAFDEFNRTPIGVGSIAQVYVGELSQKYIDKYDNIQIGKDGNRWCAIKILHPNVRSQIRRDLKIMKFCADAINWIPTMEWLSLPSEVDQFSILMNIQLDLRIEALNLERFNENFKNSIQVKFPKPFLPLSNRDVMFEEHVYGLSMEKFLSTKKQINDVELCKKVSDPFVDAFLQMLILDDFVHADLHPGNVIIRFVKTNKYGTNIISSELESYRITHDLRKKIEEDQDQDFVGKLKSVLTNYTPQICFIDTGIITELNEKNRINFIALFNALARFDGYRAGELMIERSRTPETAIDKEVFAFKVEKLVDKVKQRTFTLGTVSIGDLLDQMLSMVRSHHVRMESDFVSVVVAILLLEGIGRQLDPNLDLFESSLPILREFGFKREAKSLLKDASTLSMLKIWVGLEVRQLMHLSMKQIYDLVRTDQLCPNY

SEQ ID NO: 3417 - DNA, 1890 bp, Oryza sativa
  CDS (1)..(1890)
atgatgtcgaggtttatgcaaatagggaagagcagaaaactagttcatgatgtattggttaactcgaaacccaatagtttcactgcacataacattggatccaactttgcgttcggtttggcacatacaggcagggcctgtttgcacgggaaggttccgcatggaccgggcacgtcatccatgcttggaagagcaaaggagagtttataccggaatccagctgcaagaaacttttcagttctctcaacatgtagccagaatgcatttcatggtcaacttgcttggaagcaactcatgacaatcggttctcatgtaccaaaggcatctccgattttaagtagggttgcttgtgccattagcttggctgccactagatctaatttagttccttacctctttgctttcgttgctggggagataatgctagctcagaagaccagtgcagacggagagtacttaccaattcgtgatagtctttacacgcgtgctcaagatggtcgtatctatgtcacctccttgatattttcagcagtagagctggtcatcataatcttcagatcaatatatttggcattgttgttcactccaagtatactcatggccccatttgcagatactcttggcagtaagtacaggaaaacatggctccgtcttgtgcatcgtaccctggagaaagcaggtcctgcatttattaaatggggccaatgggctgctactcgccctgatttatttgaaagtgacctctgtgctgaattgtcaaaactacacacaaaagcacctgctcacagctttgcttataccaagaagactgttgagaaagcttttggtcgaaagctatctgatctttttgagaattttgaagaagagcctgttgcttctggaagtgttgctcaagtgcaccgagctggtttgagattccggtatcctggccagcatataaagcgtgtaacagttgctgtaaaagtaagacatcctggcgtaggagaatcaatacggagggatttcactatcattaatgcagtagctaaaatttctagatatattcctacattgaattggttgcggctggatgagagtgtgcaacagtttgctgtctttatgatgtctcaagttgaccttgcaagggaagctgctcatttgagccggtttatctacaacttccgaaggtggaaggatgtgtcttttccaaaacctctttacccacttgttcatcctgctgtattggttgaaacttatgagcaaggtgagagtgttgcacactatgtcgatgacctcgatggacatgatcgaattaaaagcgcccttgcacatattggcactcatgctctcctgaaaatgcttctggttgataactttgttcatgcggatatgcaccctggaaatattttggtccgtgttatacaaccaaggaattcaaataacacccttttgaagtctaggccacatgtagtattccttgatgtaggaatgactgctgaactttcaagtaatgatcgtgtgaatttactggaatttttcaaggctgttgcacgccgagatggtcgtacagctgcagaacgtacactgaggttatcaaaacagcaaaactgcccaaatccaaaagccttcattgaggaagttgaacggtcgttttccttttggggaacctctgaaggtgatgctgtccacccagctgagtgtatgcaccagttgcttgagcaagtacggcgccataaagtaaacattgatgggaacgtttgtactgttatggtcactacattagttcttgagggctggcagcgcaagttggatccagattacaatgttatgaaaacattacaaactttactttttaaggaagactgggccaagtctcttcagtacacaatcgaagggcttatggcaccttag

SEQ ID NO: 3418 - protein, 629 aa, Oryza sativa
MMSRFMQIGKSRKLVHDVLVNSKPNSFTAHNIGSNFAFGLAHTGRACLHGKVPHGPGTSSMLGRAKESLYRNPAARNFSVLSTCSQNAFHGQLAWKQLMTIGSHVPKASPILSRVACAISLAATRSNLVPYLFAFVAGEIMLAQKTSADGEYLPIRDSLYTRAQDGRIYVTSLIFSAVELVIIIFRSIYLALLFTPSILMAPFADTLGSKYRKTWLRLVHRTLEKAGPAFIKWGQWAATRPDLFESDLCAELSKLHTKAPAHSFAYTKKTVEKAFGRKLSDLFENFEEEPVASGSVAQVHRAGLRFRYPGQHIKRVTVAVKVRHPGVGESIRRDFTIINAVAKISRYIPTLNWLRLDESVQQFAVFMMSQVDLAREAAHLSRFIYNFRRWKDVSFPKPLYPLVHPAVLVETYEQGESVAHYVDDLDGHDRIKSALAHIGTHALLKMLLVDNFVHADMHPGNILVRVIQPRNSNNTLLKSRPHVVFLDVGMTAELSSNDRVNLLEFFKAVARRDGRTAAERTLRLSKQQNCPNPKAFIEEVERSFSFWGTSEGDAVHPAECMHQLLEQVRRHKVNIDGNVCTVMVTTLVLEGWQRKLDPDYNVMKTLQTLLFKEDWAKSLQYTIEGLMAP

SEQ ID NO: 3419 - DNA, 1872 bp, Oryza sativa
  CDS (1)..(1872)
atgctacggctggtggggatcggcgagaggctgttggcagtcggaacaaatagacgggcagcctatttttcccagccgagccacaggagtggctactacacagcagcgagggacaatggattgtcggcaaagcgaaagattccaactgtcttctctagaatgttctcacattacaaggtaattgtcaggaagaacaaagctggggatcacaagtgcagaaataggatttcaaggggattccgtaccttctctgggacagtcgcgaattcatcggcaacacagcacgcccaattggcatggaagcggctcagtcatacatacatgtacagcggaccccggtttccattgatcagccgagcagcctgtgctctaagcttttccttcacgaggttccatgttgtccctggggtcatggctctagcatttggcaagtttgcattgtcacggcctgtcctggcagattcaccacacctgcccacaatggaaggtattgtcacaaatgcgcgggatactcgccagtttctgtcatccatagtttggtcaatctgggagggtgtcactttgcttattagagctgtgcatttggcaatcttgttcttccctgcaactgcattgtctccatttgctgatactttcagtgttggatttagaaggagatggcttcgtcttgtgcgccgtacccttgaaatagctgggccagcatttatcaagtggggtcagtgggctgcaacacgacctgatctttttccaagtgatctctgtgttgagcttgccaagcttcatagtgcagctccagcacatggatttgcttacagcaaagctaccattgagaaggcgtttggtcgtaaactttctgaaatatttgagacttttgaggaggaacctgtagcttctggaagtattgcacaagtacatcgagctacattaagagatcaacatactgaaaagcatgttgctgttaaggtgaggcatcctggtgtgggtgaatcaatcaagaaagactttttactcatcaatcttctggcgaaagcttcgaatgttgtccctgggttgagctggctgaggctggatgagagtgtccgtcaatttgctgttttcatgatgtctcaagttgacctttcaagggaagctgctcatttgagtcgttttatctacaatttccgcagatggagacatgtgtctttcccaaagccattatatccactagttcatccatctgtccttgttgagacgtttgagaatggagaaagtgtttctcgttttatggatgagattgaaggaaatgctcggatgaagagagatcttgcccacattggcacatatgcattcttgaagatgcttctggaggacaattttattcatgcggatatgcatcctgggaacattcttgtccgtctaaatgagagaaaacctaagaggaaactgtttttcagacctaagccccatattgtgtttcttgatgtgggcatgactgctgaactcacccgagatgaccgtgataacttacaacagttcttcaaggcagtggccaccagggatggtcgtactgctgctaactgtactctgcaattatcaaaacagcaaagctgtccaaacccagttgcctttattgaggaattggataagacattttcgttctggggaacgcctgaaggggacattttccatcctgttgaatgcatgcatcaactgcttgacacagttcggcgccacaaagtcaacattgatgggaatatctgtactgtaatggtcacgattctggttcttgaggggtggcaacgcaagctagacccaggctttgatatcatgcacacgttgaagactctactactagacaaggatataaagcaaccagttgattttttctcataa

SEQ ID NO: 3420 - protein, 623 aa, Oryza sativa
MLRLVGIGERLLAVGTNRRAAYFSQPSHRSGYYTAARDNGLSAKRKIPTVFSRMFSHYKVIVRKNKAGDHKCRNRISRGFRTFSGTVANSSATQHAQLAWKRLSHTYMYSGPRFPLISRAACALSFSFTRFHVVPGVMALAFGKFALSRPVLADSPHLPTMEGIVTNARDTRQFLSSIVWSIWEGVTLLIRAVHLAILFFPATALSPFADTFSVGFRRRWLRLVRRTLEIAGPAFIKWGQWAATRPDLFPSDLCVELAKLHSAAPAHGFAYSKATIEKAFGRKLSEIFETFEEEPVASGSIAQVHRATLRDQHTEKHVAVKVRHPGVGESIKKDFLLINLLAKASNVVPGLSWLRLDESVRQFAVFMMSQVDLSREAAHLSRFIYNFRRWRHVSFPKPLYPLVHPSVLVETFENGESVSRFMDEIEGNARMKRDLAHIGTYAFLKMLLEDNFIHADMHPGNILVRLNERKPKRKLFFRPKPHIVFLDVGMTAELTRDDRDNLQQFFKAVATRDGRTAANCTLQLSKQQSCPNPVAFIEELDKTFSFWGTPEGDIFHPVECMHQLLDTVRRHKVNIDGNICTVMVTILVLEGWQRKLDPGFDIMHTLKTLLLDKDIKQPVDFFS

SEQ ID NO: 3421 - DNA, 1878 bp, Glycine max
  CDS (1)..(1878)
atgcttaggagtataaggagagctgcccagtctgtttgtagaatcaatagcagatacctggaagtgagtaaaaatgggccagttgtctcagttggaccgaatatccaccactgccggttgtacatgcaatataagtttccaagtgaagcatgcagttcattcttgtggcatgggacaagggaaggctttcgtaaacgtggttctttcaggaacttttctgtaacctcagcaagtaatacagtcacgcaccattcccagattgcttggaaaaggctgtacagaaagtattgttccagtggtgatggtacatttcctcctaccgtaaatatgattgctcaggcagtaagcttggctttggctcgttcttatttgctagttcctggtattttggcatttacatgtggagagcttgcattagctcagcaaaattgggcagatgcagaacgttactcatcacagaatggtttgtatatgcgtgcacaagatgggtataattacatgtttacatttgcattcataatagttgaaggacttatcttattgatgagggctctctatctagcaatattattctctcctagcattgtgatggcaccatttgctgattgttttggaccaaactttaggaaactgtggctcaatgtagttcatcgcacactagaaaaatcaggtccagcattcataaaatggggtcagtgggcagctacacggcctgatctctttcctcgagatctatgcactaagctttcagaacttcataccaaagctcctgagcatagtttctgctacacaaagaaaactatagaaagagcatttggccgaaaaatttctgaaatttttgacaattttgaagaacttcctgttgcatctggaagtattgctcaagtgcaccgtgcttcattaaaatgtcgttatcctggtcagcaagcaaagccactattggttgcagttaaggttagacatcctggcgtgggagagtcaatcagacgggattttgctattattaatttggcggcaaaaatttcaaagttcattcctgctcttaattggttacgattagatgagagtgtacaacaatttgcggttttcatgatgtctcaagttgaccttgctagggaagctgcccatttgagtcgcttcatttataatttccgcagatggaaggatgtttcttttcccaagcctgtctatccacttgtgcacccggctgttctggtggaaacatatgaaaagggtgaaagtgtctcatattatgttgatgatcttcaaggacatgaacgggttaaatccgctcttgctcacattgggactcatgcacttttgaaaatgcttcaggtggacaacttcattcatgcagatatgcatcctggaaatatccttgttcgagtgtctcagagcaagtctcgcaaacggctcttcaaatcaaagcctcatgtagttttccttgatgtaggcatgactgctgaactctctggtagtgatagagtaaatttactggaattttttaaagctgttgcccgccgagatggccggactgctgcagaatgtgccctcaacttgtcaaagcaacagaactgtccaaatccggaggccttcattgaggaggtggaagagtcatttactttttggggcaccccagaaggtgatattgttcatcctgcagagtgcatggagcaattacttgagaaagttaggcgtcatagagttaatattgatggcaatgtttgtactgtcatggtgacaaccttagttcttgagggttggcagcgaaaacttgatcctgggtacaatgtgatgcagacattgcagacattgctacttagagctgattgggcaaagtctctttcgtacacaattgacggactcatggccccttag

SEQ ID NO: 3422 - protein, 625 aa, Glycine max
MLRSIRRAAQSVCRINSRYLEVSKNGPVVSVGPNIHHCRLYMQYKFPSEACSSFLWHGTREGFRKRGSFRNFSVTSASNTVTHHSQIAWKRLYRKYCSSGDGTFPPTVNMIAQAVSLALARSYLLVPGILAFTCGELALAQQNWADAERYSSQNGLYMRAQDGYNYMFTFAFIIVEGLILLMRALYLAILFSPSIVMAPFADCFGPNFRKLWLNVVHRTLEKSGPAFIKWGQWAATRPDLFPRDLCTKLSELHTKAPEHSFCYTKKTIERAFGRKISEIFDNFEELPVASGSIAQVHRASLKCRYPGQQAKPLLVAVKVRHPGVGESIRRDFAIINLAAKISKFIPALNWLRLDESVQQFAVFMMSQVDLAREAAHLSRFIYNFRRWKDVSFPKPVYPLVHPAVLVETYEKGESVSYYVDDLQGHERVKSALAHIGTHALLKMLQVDNFIHADMHPGNILVRVSQSKSRKRLFKSKPHVVFLDVGMTAELSGSDRVNLLEFFKAVARRDGRTAAECALNLSKQQNCPNPEAFIEEVEESFTFWGTPEGDIVHPAECMEQLLEKVRRHRVNIDGNVCTVMVTTLVLEGWQRKLDPGYNVMQTLQTLLLRADWAKSLSYTIDGLMAP

SEQ ID NO: 3423 - DNA, 1977 bp, Oryza sativa
  CDS (1)..(1977)
atgacaattccaactttgcctcggcgcaccacgactccccaacgaacacattcgcagcaggggtctgacaggtgcgaattaattttttttttcttctccccgatgctacggctggtggggatcggcgagaggctgttggcagtcggaacaaatagacgggcagcctatttttcccagccgagccacaggagtggctactacacagcagcgagggacaatggattgtcggcaaagcgaaagattccaactgtcttctctagaatgttctcacattacaaggtaattgtcaggaagaacaaagctggggatcacaagtgcagaaataggatttcaaggggattccgtaccttctctgggacagtcgcgaattcatcggcaacacagcacgcccaattggcatggaagcggctcagtcatacatacatgtacagcggaccccggtttccattgatcagccgagcagcctgtgctctaagcttttccttcacgaggttccatgttgtccctggggtcatggctctagcatttggcaagtttgcattgtcacggcctgtcctgggccagattcaccacacctgcccacaatggaaggtattgtcacaaatggcgcgggatactcgccagtttctgtcatccatagtttggtcaatctgggagggtgtcactttgcttattagagctgtgcatttggcaatcttgttcttccctgcaactgcattgtctccatttgctgatactttcagtgttggatttagaaggagatggcttcgtcttgtgcgccgtacccttgaaatagctgggccagcatttatcaagtggggtcagtgggctgcaacacgacctgatctttttccaagtgatctctgtgttgagcttgccaagcttcatagtgcagctccagcacatggatttgcttacagcaaagctaccattgagaaggcgtttggtcgtaaactttctgaaatatttgagacttttgaggaggaacctgtagcttctggaagtattgcacaagtacatcgagctacattaagagatcaacatactgaaaagcatgttgctgttaaggtgaggcatcctggtgtgggtgaatcaatcaagaaagactttttactcatcaatcttctggcgaaagcttcgaatgttgtccctgggttgagctggctgaggctggatgagagtgtccgtcaatttgctgttttcatgatgtctcaagttgacctttcaagggaagctgctcatttgagtcgttttatctacaatttccgcagatggagacatgtgtctttcccaaagccattatatccactagttcatccatctgtccttgttgagacgtttgagaatggagaaagtgtttctcgttttatggatgagattgaaggaaatgctcggatgaagagagatcttgcccacattggcacatatgcattcttgaagatgcttctggaggacaattttattcatgcggatatgcatcctgggaacattcttgtccgtctaaatgagagaaaacctaagaggaaactgtttttcagacctaagccccatattgtgtttcttgatgtgggcatgactgctgaactcacccgagatgaccgtgataacttacaacagttcttcaaggcagtggccaccagggatggtcgtactgctgctaactgtactctgcaattatcaaaacagcaaagctgtccaaacccagttgcctttattgaggaattggataagacattttcgttctggggaacgcctgaaggggacattttccatcctgttgaatgcatgcatcaactgcttgacacagttcggcgccacaaagtcaacattgatgggaatatctgtactgtaatggtcacgattctggttcttgaggggtggcaacgcaagctagacccaggctttgatatcatgcacacgttgaagactctactactagacaaggatataaagcaaccagttgattttttctcataa

SEQ ID NO: 3424 - protein, 658 aa, Oryza sativa
MTIPTLPRRTTTPQRTHSQQGSDRCELIFFFFSPMLRLVGIGERLLAVGTNRRAAYFSQPSHRSGYYTAARDNGLSAKRKIPTVFSRMFSHYKVIVRKNKAGDHKCRNRISRGFRTFSGTVANSSATQHAQLAWKRLSHTYMYSGPRFPLISRAACALSFSFTRFHVVPGVMALAFGKFALSRPVLGQIHHTCPQWKVLSQMARDTRQFLSSIVWSIWEGVTLLIRAVHLAILFFPATALSPFADTFSVGFRRRWLRLVRRTLEIAGPAFIKWGQWAATRPDLFPSDLCVELAKLHSAAPAHGFAYSKATIEKAFGRKLSEIFETFEEEPVASGSIAQVHRATLRDQHTEKHVAVKVRHPGVGESIKKDFLLINLLAKASNVVPGLSWLRLDESVRQFAVFMMSQVDLSREAAHLSRFIYNFRRWRHVSFPKPLYPLVHPSVLVETFENGESVSRFMDEIEGNARMKRDLAHIGTYAFLKMLLEDNFIHADMHPGNILVRLNERKPKRKLFFRPKPHIVFLDVGMTAELTRDDRDNLQQFFKAVATRDGRTAANCTLQLSKQQSCPNPVAFIEELDKTFSFWGTPEGDIFHPVECMHQLLDTVRRHKVNIDGNICTVMVTILVLEGWQRKLDPGFDIMHTLKTLLLDKDIKQPVDFFS

SEQ ID NO: 3425 - DNA, 1875 bp, Zea mays
  CDS (1)..(1875)
atgcagcggctagtgggggtgggcgagaggttattggcaatcggaacaaataggcgggcggccacttattcacattcgagccacagaagtgggtactacacagcagtgagggacaatggcttgtcaacaaggcgtaagattccagccatcttatctagaatgttctcacattacaaagtcattagcagaaagaacagagctgaggatcacaagtgtagaaccaggatgtcaagaggctaccacactctctctgtgccagtgacgaattcatctgcaacccagcaagcacaattggcatggaagcagcttggtcatatgtacacatatagaggtccacggttcccactgctgggacgagcagcttgtgctgtaagcctgtccttcacgaggttccatataatccatggggtcatggctctagctgttggcaagatggcgcttgcacctcctgtccttgcagactcacgacccttcatgccaagaatggatggcatcatcacaaaggcacaagatactcgccaatttctgtcatctcttgtttgctcaatctgggagggcatcactttgcttgttagagctgtgcatttggcattcctattcttccctgcaactgcattagctccatttgctgacaagtttagtattgcattcaggagaaggtggcttagtcttatgcgccggacccttgaaaaggctgggccagcattcattaagtggggccagtgggctgcaacacgccctgatctttttccaagtgatctctgtgtagagcttgcaaagctccatagtgctgctccagcgcatggctttgcttacagcaaggctgccattgagaaggcattcggtcgtcagctttctgaaatatttgagtcctttgaggagaaccctgtagcttctggaagcattgcacaaatacatcgagccacactaaaacatcaacatcctggaaagcatgttgcagttaaggtgaggcatcctaatgttggagaatcaatcaagagagactttctactcataaatcttgtggcaaaggcttctgatatggtccctggattaagctggctgaggctggatgagagtgttcgccagttcgcagtattcatgatgtctcaagttgatctttctagggaagctgctcatttgagtcgttttatctacaacttccgcagatggagacatgtgtctttccctaagcccttatatccatttgtgcatccatctgtcctagttgagacttttgagaatggagaaagtgtttctcgttttatggaagaaatcgaagggaatgctcggatgaagaaagaccttgcacacattgggacatatgctttcctgaagatgcttctggaggacaattttattcatgcagatatgcaccctggcaacattcttgttcgtttaaatgagaacaagcttgcaaggagacggtttttcagagctaagccccatattgtgttccttgacgtgggcatgactgctgagctcacacgatctgaccgtgataacttacaacagttcttcaaggcggtggctactagagatggccgtactgctgccaagtgtacccttcagttatcaaagaatcagagctgtccaaatccagtggccttcaccgaggagctagacaagacgtttacattttggggaacacctgaaggggatgtttttcatcctgttgaatgcatgcatgagttgcttgatacagttcggcgccacaaagtcaacattgatggcaacatatgtactgtaatggttaccattttggtccttgaggggtggcaacgcaagctagacccaggctttgatatcatgcaaacgttgaagactttactgctagagaaggacataaagcaaccaattgattttttctcataa

SEQ ID NO: 3426 - protein, 624 aa, Zea mays
MQRLVGVGERLLAIGTNRRAATYSHSSHRSGYYTAVRDNGLSTRRKIPAILSRMFSHYKVISRKNRAEDHKCRTRMSRGYHTLSVPVTNSSATQQAQLAWKQLGHMYTYRGPRFPLLGRAACAVSLSFTRFHIIHGVMALAVGKMALAPPVLADSRPFMPRMDGIITKAQDTRQFLSSLVCSIWEGITLLVRAVHLAFLFFPATALAPFADKFSIAFRRRWLSLMRRTLEKAGPAFIKWGQWAATRPDLFPSDLCVELAKLHSAAPAHGFAYSKAAIEKAFGRQLSEIFESFEENPVASGSIAQIHRATLKHQHPGKHVAVKVRHPNVGESIKRDFLLINLVAKASDMVPGLSWLRLDESVRQFAVFMMSQVDLSREAAHLSRFIYNFRRWRHVSFPKPLYPFVHPSVLVETFENGESVSRFMEEIEGNARMKKDLAHIGTYAFLKMLLEDNFIHADMHPGNILVRLNENKLARRRFFRAKPHIVFLDVGMTAELTRSDRDNLQQFFKAVATRDGRTAAKCTLQLSKNQSCPNPVAFTEELDKTFTFWGTPEGDVFHPVECMHELLDTVRRHKVNIDGNICTVMVTILVLEGWQRKLDPGFDIMQTLKTLLLEKDIKQPIDFFS

SEQ ID NO: 3427 - DNA, 1878 bp, Zea mays
  CDS (1)..(1878)
atgatgtcgaggtttgcccacttggggaagagcagaaaacttgctgaaacccttttggttgcctcaaagcccaatactgctggtggccaaaacattgcttcaagctttgcattcggcttgggttattccagcagggcctttttgcacgggaaggttcataatggtccaaacacctcctacatgctgggaagagcaaatgatagcttacattggagcactggtgtgaggaaattctcaattctttcatcttgtagccagaatgcatttcagagtcagcttgcttggaagcgacttgtagcactgggttctcgtgcaccaaaagcatctccaatttttagtaaggttgcttgtgccattggcttggctgtgagtaggtctaatatagccccttaccttgtcgcttttattgcgggagaggtaatgctagctcagaagacatctgcagatggagaatactacccaatacgtgagagagctcaggatggccgtatttacgttacctctctaatatattcggcagtagaattggttattataatcttcagatcaatatatttggcattgctgttcactccaagtatactgatggccccatttgcagagactcttggcagtaagtataggaaaacatggcttcgacttgtccatcgtactttggagcttgcaggtcctgcgtttatcaaatggggccaatgggctgcaacacgccctgatctgtttccaagtgacctttgtactgaattgtcaaagctgcacacaaaagcaccagctcacagctttacctatactaagaaaactgttgagaaagcttttggtcgaaagctatcagacatttttgaaaattttgaagaggaccctgttgcatctggaagtgttgctcaagtgcatcgggctgttctacgattccggtatcctaatcggcagacaaagcgtgtaactgttgcagtaaaagtaaggcatcctggtgtaggggactcaataagaagagatttcaatatcatcaatgccgtagcaaaaatatctagatatatccccacgctgaattggttgcgcctagatgagagtgtacaacagtttgctgtcttcatgatgtctcaagttgaccttgcaagggaagctgctcatctgagccggtttatctacaacttccgaaggtggaaggatgtatctttcccaagacctctctatccacttgttcatcctgctgttttagttgagacttacgagcatggggagagtgtttcacactatgttgatgaccttgaaggacatgatcgaattaaaagtgctctggcccatattggtactcacgcgctcttgaaaatgctactggttgataatttcgtccatgcagatatgcacccaggaaatattttagttcgtgttgcacaaccaaagaactcaaataacacccttaaaaagtcaaggccacatgtagtcttcctggatgtaggaatgactgctgaactttcaagtaatgaccgtgtgaatttacttgagttcttcaaggctgttgctcgccgagatggtcgtacagctgcagaaagtactctaaagttgtcaaaacaacagaattgtccaaatccaaaagcttttattgaggaagttgaacgatcattctctttttggggcactgctgaaggtgatgctatccacccagctgagtgtatgcaccaactgcttgagcaagttcgatgtcataaagtgaatatcgatggcaatgtttgtactgtcatggtgactacattagttcttgagggctggcaacgtaagttggatccagattataatgttatgaagactctgcaaactttactttttaaggaagattgggcgaagtctcttcaatacactatccaagggctcatggcgccttag

SEQ ID NO: 3428 - protein, 625 aa, Zea mays
MMSRFAHLGKSRKLAETLLVASKPNTAGGQNIASSFAFGLGYSSRAFLHGKVHNGPNTSYMLGRANDSLHWSTGVRKFSILSSCSQNAFQSQLAWKRLVALGSRAPKASPIFSKVACAIGLAVSRSNIAPYLVAFIAGEVMLAQKTSADGEYYPIRERAQDGRIYVTSLIYSAVELVIIIFRSIYLALLFTPSILMAPFAETLGSKYRKTWLRLVHRTLELAGPAFIKWGQWAATRPDLFPSDLCTELSKLHTKAPAHSFTYTKKTVEKAFGRKLSDIFENFEEDPVASGSVAQVHRAVLRFRYPNRQTKRVTVAVKVRHPGVGDSIRRDFNIINAVAKISRYIPTLNWLRLDESVQQFAVFMMSQVDLAREAAHLSRFIYNFRRWKDVSFPRPLYPLVHPAVLVETYEHGESVSHYVDDLEGHDRIKSALAHIGTHALLKMLLVDNFVHADMHPGNILVRVAQPKNSNNTLKKSRPHVVFLDVGMTAELSSNDRVNLLEFFKAVARRDGRTAAESTLKLSKQQNCPNPKAFIEEVERSFSFWGTAEGDAIHPAECMHQLLEQVRCHKVNIDGNVCTVMVTTLVLEGWQRKLDPDYNVMKTLQTLLFKEDWAKSLQYTIQGLMAP

SEQ ID NO: 3429 - DNA, 23 bp, Artificial sequence
  primer
atgggcctctacgtttcctcaga

SEQ ID NO: 3430 - DNA, 27 bp, Artificial sequence
  primer
ttattctttaaaaccgttaatccatgc

SEQ ID NO: 3431 - protein, 539 aa, Artificial sequence
  consensus sequence
  Variant (2)..(8): Xaa in position 2 to 8 is any amino acid
  Variant (10)..(10): Xaa in position 10 is any amino acid
  Variant (12)..(16): Xaa in position 12 to 16 is any amino acid
  Variant (18)..(26): Xaa in position 18 to 26 is any amino acid
  Variant (27)..(48): Xaa in position 27 to 48 is any or no amino acid
  Variant (50)..(57): Xaa in position 50 to 57 is any amino acid
  Variant (59)..(60): Xaa in position 59 to 60 is any amino acid
  Variant (63)..(63): Xaa in position 63 is any amino acid
  Variant (67)..(67): Xaa in position 67 is any amino acid
  Variant (72)..(73): Xaa in position 72 to 73 is any amino acid
  Variant (75)..(75): Xaa in position 75 is any amino acid
  Variant (77)..(77): Xaa in position 77 is any amino acid
  Variant (79)..(82): Xaa in position 79 to 82 is any amino acid
  Variant (84)..(85): Xaa in position 84 to 85 is any amino acid
  Variant (87)..(88): Xaa in position 87 to 88 is any amino acid
  Variant (90)..(95): Xaa in position 90 to 95 is any amino acid
  Variant (97)..(116): Xaa in position 97 to 116 is any amino acid
  Variant (117)..(118): Xaa in position 117 to 118 is any or no amino acid
  Variant (120)..(121): Xaa in position 120 to 121 is any amino acid
  Variant (123)..(125): Xaa in position 123 to 125 is any amino acid
  Variant (126)..(126): Xaa in position 126 is any or no amino acid
  Variant (128)..(130): Xaa in position 128 to 130 is any amino acid
  Variant (132)..(132): Xaa in position 132 is any amino acid
  Variant (137)..(140): Xaa in position 137 to 140 is any amino acid
  Variant (142)..(146): Xaa in position 142 to 146 is any amino acid
  Variant (147)..(189): Xaa in position 147 to 189 is any or no amino acid
  Variant (192)..(192): Xaa in position 192 is any amino acid
  Variant (194)..(195): Xaa in position 194 to 195 is any amino acid
  Variant (198)..(198): Xaa in position 198 is any amino acid
  Variant (200)..(202): Xaa in position 200 to 202 is any amino acid
  Variant (204)..(205): Xaa in position 204 to 205 is any amino acid
  Variant (207)..(208): Xaa in position 207 to 208 is any amino acid
  Variant (210)..(213): Xaa in position 210 to 213 is any amino acid
  Variant (215)..(220): Xaa in position 215 to 220 is any amino acid
  Variant (221)..(221): Xaa in position 221 is any or no amino acid
  Variant (223)..(225): Xaa in position 223 to 225 is any amino acid
  Variant (228)..(232): Xaa in position 228 to 232 is any amino acid
  Variant (234)..(235): Xaa in position 234 to 235 is any amino acid
  Variant (237)..(239): Xaa in position 237 to 239 is any amino acid
  Variant (241)..(242): Xaa in position 241 to 242 is any amino acid
  Variant (244)..(244): Xaa in position 244 is any amino acid
  Variant (247)..(248): Xaa in position 247 to 248 is any amino acid
  Variant (251)..(252): Xaa in position 251 to 252 is any amino acid
  Variant (254)..(255): Xaa in position 254 to 255 is any amino acid
  Variant (257)..(258): Xaa in position 257 to 258 is any amino acid
  Variant (261)..(266): Xaa in position 261 to 266 is any amino acid
  Variant (267)..(268): Xaa in position 267 to 268 is any or no amino acid
  Variant (271)..(271): Xaa in position 271 is any amino acid
  Variant (273)..(281): Xaa in position 273 to 281 is any amino acid
  Variant (283)..(283): Xaa in position 283 is any amino acid
  Variant (285)..(300): Xaa in position 285 to 300 is any amino acid
  Variant (301)..(315): Xaa in position 301 to 315 is any or no amino acid
  Variant (317)..(320): Xaa in position 317 to 320 is any amino acid
  Variant (322)..(322): Xaa in position 322 is any amino acid
  Variant (324)..(326): Xaa in position 324 to 326 is any amino acid
  Variant (328)..(328): Xaa in position 328 is any amino acid
  Variant (330)..(330): Xaa in position 330 is any amino acid
  Variant (334)..(334): Xaa in position 334 is any amino acid
  Variant (339)..(350): Xaa in position 339 to 350 is any amino acid
  Variant (351)..(424): Xaa in position 351 to 424 is any or no amino acid
  Variant (426)..(426): Xaa in position 426 is any amino acid
  Variant (428)..(431): Xaa in position 428 to 431 is any amino acid
  Variant (433)..(436): Xaa in position 433 to 436 is any amino acid
  Variant (438)..(443): Xaa in position 438 to 443 is any amino acid
  Variant (445)..(445): Xaa in position 445 is any amino acid
  Variant (447)..(450): Xaa in position 447 to 450 is any amino acid
  Variant (453)..(472): Xaa in position 453 to 472 is any amino acid
  Variant (473)..(474): Xaa in position 473 to 474 is any or no amino acid
  Variant (476)..(502): Xaa in position 476 to 502 is any amino acid
  Variant (503)..(505): Xaa in position 503 to 505 is any or no amino acid
  Variant (507)..(509): Xaa in position 507 to 509 is any amino acid
  Variant (511)..(511): Xaa in position 511 is any amino acid
  Variant (513)..(513): Xaa in position 513 is any amino acid
  Variant (515)..(527): Xaa in position 515 to 527 is any amino acid
  Variant (529)..(529): Xaa in position 529 is any amino acid
  Variant (533)..(534): Xaa in position 533 to 534 is any amino acid
  Variant (536)..(536): Xaa in position 536 is any amino acid
RXXXXXXXFXPXXXXXPXXXXXXXXXXXXXXXXXXXXXXXXXXXXXXXWXXXXXXXXEXXGPXFIKXGQWAXXRXDXFXXXXCXXLXXLXXXXXXHXXXXXXXXXXXXXXXXXXXXXXFXXFXXXXPXXXGXIAQVXXXXLXXXXXXXXXXXXXXXXXXXXXXXXXXXXXXXXXXXXXXXXXXXXXXXXVAXKXXHPXVXXXIXXDXXIXXXXAXXXXXXXPXXXWLXXXXXVXXFXXXMXXQXDLXXEAXXLXXFXXNFXXXXXXXXFPXPXXXXXXXXXLXEXXXXXXXXXXXXXXXXXXXXXXXXXXXXXXXGXXXXLXMXXXDXFXHADXHPGNXXXXXXXXXXXXXXXXXXXXXXXXXXXXXXXXXXXXXXXXXXXXXXXXXXXXXXXXXXXXXXXXXXXXXXXXXXXXXXXXXXXXXXDXGXXXXLXXXXRXXXXXXFXAXXXXDGXXXXXXXXXXXXXXXXXXXXXXFXXXXXXXXXXXXXXXXXXXXXXXXXXXXXXLXXXRXHXVXXXXXXXXXXXXXLXLEGXXRXLDP

SEQ ID NO: 3432 - protein, 46 aa, Artificial sequence
  protein pattern
  Variant (2)..(4): Xaa in position 2 to 4 is any or no amino acid
  Variant (8)..(8): Xaa in position 8 is any amino acid
  Variant (9)..(9): Xaa in position 9 is Ala or Gly
  Variant (13)..(13): Xaa in position 13 is Ala, Gly or Ser
  Variant (14)..(14): Xaa in position 14 is Ala, Ser or Thr
  Variant (16)..(16): Xaa in position 16 is any amino acid
  Variant (18)..(18): Xaa in position 18 is Ile or Leu
  Variant (20)..(20): Xaa in position 20 is Glu, Pro or Ser
  Variant (21)..(22): Xaa in position 21 to 22 is any amino acid
  Variant (23)..(23): Xaa in position 23 is Phe, Ile, Leu or Met
  Variant (25)..(26): Xaa in position 25 to 26 is any amino acid
  Variant (27)..(27): Xaa in position 27 is Leu or Met
  Variant (28)..(28): Xaa in position 28 is Ala, Gly, Ser or Thr
  Variant (29)..(29): Xaa in position 29 is any amino acid
  Variant (30)..(30): Xaa in position 30 is Phe or Leu
  Variant (31)..(33): Xaa in position 31 to 33 is any amino acid
  Variant (34)..(34): Xaa in position 34 is Ala, Gly, Asn or Val
  Variant (35)..(36): Xaa in position 35 to 36 is any amino acid
  Variant (38)..(41): Xaa in position 38 to 41 is any amino acid
  Variant (42)..(42): Xaa in position 42 is Ser or Thr
  Variant (43)..(45): Xaa in position 43 to 45 is any amino acid
  Variant (46)..(46): Xaa in position 46 is Ile, Leu, Met or Val
AXXXFIKXXQWAXXRXDXFXXXXCXXXXXXXXXXXXHXXXXXXXXX

SEQ ID NO: 3433 - protein, 34 aa, Artificial sequence
  protein pattern
  Variant (2)..(2): Xaa in position 2 is His, Lys or Arg
  Variant (4)..(4): Xaa in position 4 is any amino acid
  Variant (5)..(5): Xaa in position 5 is Ile, Leu, Met or Val
  Variant (6)..(6): Xaa in position 6 is Asp or Glu
  Variant (7)..(7): Xaa in position 7 is Ala, Gly, Pro or Ser
  Variant (8)..(8): Xaa in position 8 is Asp or Asn
  Variant (9)..(9): Xaa in position 9 is Phe, Ile or Val
  Variant (10)..(10): Xaa in position 10 is any amino acid
  Variant (11)..(11): Xaa in position 11 is Asn, Ser or Thr
  Variant (12)..(12): Xaa in position 12 is Thr or Val
  Variant (13)..(13): Xaa in position 13 is Ile, Leu, Met or Val
  Variant (14)..(14): Xaa in position 14 is Ile, Leu or Val
  Variant (15)..(15): Xaa in position 15 is Ala, Ser or Thr
  Variant (16)..(16): Xaa in position 16 is any amino acid
  Variant (18)..(18): Xaa in position 18 is any or no amino acid
  Variant (20)..(20): Xaa in position 20 is any or no amino acid
  Variant (23)..(23): Xaa in position 23 is any amino acid
  Variant (24)..(24): Xaa in position 24 is Gly or Gln
  Variant (26)..(26): Xaa in position 26 is any amino acid
  Variant (27)..(27): Xaa in position 27 is Leu or Met
  Variant (28)..(28): Xaa in position 28 is any amino acid
  Variant (30)..(31): Xaa in position 30 to 31 is any amino acid
  Variant (32)..(32): Xaa in position 32 is Asp or Asn
  Variant (33)..(33): Xaa in position 33 is Ile, Leu or Val
  Variant (34)..(34): Xaa in position 34 is Phe, Leu or Met
HXVXXXXXXXXXXXXXLXLXEGXXRXXXPXXXXX

SEQ ID NO: 3434 - protein, 20 aa, Artificial sequence
  protein pattern
  Variant (2)..(2): Xaa in position 2 is Asp or Glu
  Variant (3)..(3): Xaa in position 3 is Ala, Asp, Glu, Asn, Ser or Thr
  Variant (5)..(7): Xaa in position 5 to 7 is any amino acid
  Variant (9)..(9): Xaa in position 9 is Ile, Leu, Met or Val
  Variant (10)..(10): Xaa in position 10 is Ala or Gly
  Variant (11)..(11): Xaa in position 11 is any amino acid
  Variant (13)..(13): Xaa in position 13 is Ala or Ser
  Variant (14)..(14): Xaa in position 14 is Ile or Val
  Variant (17)..(17): Xaa in position 17 is Ile or Val
  Variant (18)..(18): Xaa in position 18 is His or Tyr
  Variant (19)..(19): Xaa in position 19 is any amino acid
  Variant (20)..(20): Xaa in position 20 is Ala or Gly
FXXFXXXPXXXGXXAQXXXX

SEQ ID NO: 3435 - protein, 25 aa, Artificial sequence
  protein pattern
  Variant (2)..(2): Xaa in position 2 is Ala, Gly or Ser
  Variant (3)..(3): Xaa in position 3 is any amino acid
  Variant (4)..(4): Xaa in position 4 is Phe, Leu or Met
  Variant (6)..(7): Xaa in position 6 to 7 is any amino acid
  Variant (9)..(9): Xaa in position 9 is Leu, Met or Val
  Variant (12)..(13): Xaa in position 12 to 13 is any amino acid
  Variant (15)..(15): Xaa in position 15 is Ala, Cys or Gly
  Variant (16)..(17): Xaa in position 16 to 17 is any amino acid
  Variant (19)..(20): Xaa in position 19 to 20 is any amino acid
  Variant (22)..(24): Xaa in position 22 to 24 is any amino acid
FXXXMXXQXDLXXEXXXLXXFXXXF

SEQ ID NO: 3436 - protein, 19 aa, Artificial sequence
  protein pattern
  Variant (2)..(2): Xaa in position 2 is Ala or Pro
  Variant (3)..(3): Xaa in position 3 is any amino acid
  Variant (4)..(4): Xaa in position 4 is Ala, Gly or Pro
  Variant (5)..(8): Xaa in position 5 to 8 is any amino acid
  Variant (9)..(9): Xaa in position 9 is Ser, Thr or Val
  Variant (10)..(12): Xaa in position 10 to 12 is any amino acid
  Variant (13)..(13): Xaa in position 13 is Ile, Leu, Met or Val
  Variant (14)..(14): Xaa in position 14 is Leu or Met
  Variant (15)..(15): Xaa in position 15 is Phe, Ile or Val
  Variant (17)..(18): Xaa in position 17 to 18 is any or no amino acid
FXXXXXXXXXXXXXXEXXE

SEQ ID NO: 3437 - DNA, 972 bp, Escherichia coli
  CDS (1)..(972): transl_table=11
atgagtaagatttttgaagataactcgctgactatcggtcacacgtcgctggttcgcctgaatcgcatcggtaacggacgcattctggcgaaggtggaatctcgtaaccccagcttcagcgttaagtgccgtatcggtgccaacatgatttgggatgccgaaaagcgcggcgtgctgaaaccaggcgttgaactggttgaaccgaccagcggtaataccgggattgcactggcctatgtagctgccgctcgcggttacaaactcaccctgaccatgccagaaaccatgagtattgaacgccgcaagctgctgaaagcgttaggtgcaaacctggtgctgacggaaggtgctaaaggcatgaaaggcgcaatccaaaaagcagaagaaattgtcgccagcaatccagagaaatacctgctgctgcaacaattcagcaatccggcaaaccctgaaattcacgaaaagaccaccggtccggagatatgggaagataccgacggtcaggttgatgtatttattgctggcgttgggactggcggtacgctgactggcgtcagccgctacattaaaggcaccaaaggcaagaccgatcttatctctgtcgccgttgagccaaccgattctccagttatcgcccaggcgctggcaggtgaagagattaaacctggcccgcataaaattcagggtattggcgctggttttatcccggctaacctcgatctcaagctggtcgataaagtcattggcatcaccaatgaagaagcgatttctaccgcgcgtcgtctgatggaagaagaaggtattcttgcaggtatctcttctggagcagctgttgccgcggcgttgaaactacaagaagatgaaagctttaccaacaagaatattgtggttattctaccatcatcgggtgagcgttatttaagcaccgcattgtttgccgatctcttcactgagaaagaattgcaacagtaa

SEQ ID NO: 3438 - protein, 323 aa, Escherichia coli
MSKIFEDNSLTIGHTSLVRLNRIGNGRILAKVESRNPSFSVKCRIGANMIWDAEKRGVLKPGVELVEPTSGNTGIALAYVAAARGYKLTLTMPETMSIERRKLLKALGANLVLTEGAKGMKGAIQKAEEIVASNPEKYLLLQQFSNPANPEIHEKTTGPEIWEDTDGQVDVFIAGVGTGGTLTGVSRYIKGTKGKTDLISVAVEPTDSPVIAQALAGEEIKPGPHKIQGIGAGFIPANLDLKLVDKVIGITNEEAISTARRLMEEEGILAGISSGAAVAAALKLQEDESFTNKNIVVILPSSGERYLSTALFADLFTEKELQQ

SEQ ID NO: 3439 - DNA, 1689 bp, Glycine max; identical to SEQ ID NO: 82
  CDS (448)..(1365)

SEQ ID NO: 3440 - protein, 305 aa, Glycine max; identical to SEQ ID NO: 83

SEQ ID NO: 3441 - DNA, 1618 bp, Glycine max; identical to SEQ ID NO: 84
  CDS (430)..(1347)

SEQ ID NO: 3442 - protein, 305 aa, Glycine max; identical to SEQ ID NO: 85

SEQ ID NO: 3443 - DNA, 1190 bp, Helianthus annuus; identical to SEQ ID NO: 86
  CDS (33)..(1010)

SEQ ID NO: 3444 - protein, 325 aa, Helianthus annuus; identical to SEQ ID NO: 87

SEQ ID NO: 3445 - DNA, 1855 bp, Citrullus lanatus (watermelon); identical to SEQ ID NO: 88
  CDS (564)..(1541)

SEQ ID NO: 3446 - protein, 325 aa, Citrullus lanatus (watermelon); identical to SEQ ID NO: 89

SEQ ID NO: 3447 - DNA, 2978 bp, Escherichia coli; identical to SEQ ID NO: 90
  CDS (874)..(1845): transl_table=11
  exon (1846)..(2978)

SEQ ID NO: 3448 - protein, 323 aa, Escherichia coli; identical to SEQ ID NO: 91

SEQ ID NO: 3449 - DNA, 1483 bp, Spinacia oleracea; identical to SEQ ID NO: 92
  CDS (62)..(1213)

SEQ ID NO: 3450 - protein, 383 aa, Spinacia oleracea; identical to SEQ ID NO: 93

SEQ ID NO: 3451 - DNA, 969 bp, Erwinia chrysanthemi; identical to SEQ ID NO: 94
  CDS (1)..(969): transl_table=11

SEQ ID NO: 3452 - protein, 322 aa, Erwinia chrysanthemi; identical to SEQ ID NO: 95

SEQ ID NO: 3453 - DNA, 1678 bp, Sorghum bicolor; identical to SEQ ID NO: 96
  CDS (198)..(1406)

SEQ ID NO: 3454 - protein, 402 aa, Sorghum bicolor; identical to SEQ ID NO: 97

SEQ ID NO: 3455 - DNA, 1407 bp, Glycine max; identical to SEQ ID NO: 98
  CDS (126)..(1103)

SEQ ID NO: 3456 - protein, 325 aa, Glycine max; identical to SEQ ID NO: 99

SEQ ID NO: 3457 - DNA, 1125 bp, Coprinopsis cinerea okayama7#130; identical to SEQ ID NO: 104
  CDS (1)..(1125)

SEQ ID NO: 3458 - protein, 374 aa, Coprinopsis cinerea okayama7#130; identical to SEQ ID NO: 105

SEQ ID NO: 3459 - DNA, 954 bp, Clavibacter michiganensis subsp. sepedonicus; identical to SEQ ID NO: 106
  CDS (1)..(954): transl_table=11

SEQ ID NO: 3460 - protein, 317 aa, Clavibacter michiganensis subsp. sepedonicus; identical to SEQ ID NO: 107

SEQ ID NO: 3461 - DNA, 960 bp, Synechococcus sp. PCC 7002; identical to SEQ ID NO: 108
  CDS (1)..(960): transl_table=11

SEQ ID NO: 3462 - protein, 319 aa, Synechococcus sp. PCC 7002; identical to SEQ ID NO: 109

SEQ ID NO: 3463 - DNA, 978 bp, Synechococcus sp. PCC 7002; identical to SEQ ID NO: 110
  CDS (1)..(978): transl_table=11

SEQ ID NO: 3464 - protein, 325 aa, Synechococcus sp. PCC 7002; identical to SEQ ID NO: 111

SEQ ID NO: 3465 - DNA, 924 bp, Exiguobacterium sibiricum 255-15; identical to SEQ ID NO: 112
  CDS (1)..(924): transl_table=11

SEQ ID NO: 3466 - protein, 307 aa, Exiguobacterium sibiricum 255-15; identical to SEQ ID NO: 113

SEQ ID NO: 3467 - DNA, 981 bp, Mesorhizobium loti MAFF303099; identical to SEQ ID NO: 114
  CDS (1)..(981): transl_table=11

SEQ ID NO: 3468 - protein, 326 aa, Mesorhizobium loti MAFF303099; identical to SEQ ID NO: 115

SEQ ID NO: 3469 - DNA, 1089 bp, Mesorhizobium loti MAFF303099; identical to SEQ ID NO: 116
  CDS (1)..(1089): transl_table=11

SEQ ID NO: 3470 - protein, 362 aa, Mesorhizobium loti MAFF303099; identical to SEQ ID NO: 117

SEQ ID NO: 3471 - DNA, 930 bp, Thermoplasma volcanium GSS1; identical to SEQ ID NO: 118
  CDS (1)..(930): transl_table=11

SEQ ID NO: 3472 - protein, 309 aa, Thermoplasma volcanium GSS1; identical to SEQ ID NO: 119

SEQ ID NO: 3473 - DNA, 876 bp, Thermotoga maritima MSB8; identical to SEQ ID NO: 120
  CDS (1)..(876): transl_table=11

SEQ ID NO: 3474 - protein, 291 aa, Thermotoga maritima MSB8; identical to SEQ ID NO: 121

SEQ ID NO: 3475 - DNA, 969 bp, Vibrio cholerae O1 biovar eltor str. N16961; identical to SEQ ID NO: 122
  CDS (1)..(969): transl_table=11

SEQ ID NO: 3476 - protein, 322 aa, Vibrio cholerae O1 biovar eltor str. N16961; identical to SEQ ID NO: 123

SEQ ID NO: 3477 - DNA, 924 bp, Bacillus halodurans C-125; identical to SEQ ID NO: 124
  CDS (1)..(924): transl_table=11

SEQ ID NO: 3478 - protein, 307 aa, Bacillus halodurans C-125; identical to SEQ ID NO: 125

SEQ ID NO: 3479 - DNA, 939 bp, Bacillus halodurans C-125; identical to SEQ ID NO: 126
  CDS (1)..(939): transl_table=11

SEQ ID NO: 3480 - protein, 312 aa, Bacillus halodurans C-125; identical to SEQ ID NO: 127

SEQ ID NO: 3481 - DNA, 948 bp, Pasteurella multocida subsp. multocida str. Pm70; identical to SEQ ID NO: 128
  CDS (1)..(948): transl_table=11

SEQ ID NO: 3482 - protein, 315 aa, Pasteurella multocida subsp. multocida str. Pm70; identical to SEQ ID NO: 129

SEQ ID NO: 3483 - DNA, 918 bp, Pseudomonas aeruginosa PAO1; identical to SEQ ID NO: 130
  CDS (1)..(918): transl_table=11

SEQ ID NO: 3484 - protein, 305 aa, Pseudomonas aeruginosa PAO1; identical to SEQ ID NO: 131

SEQ ID NO: 3485 - DNA, 933 bp, Lactococcus lactis subsp. lactis Il1403; identical to SEQ ID NO: 132
  CDS (1)..(933): transl_table=11

SEQ ID NO: 3486 - protein, 310 aa, Lactococcus lactis subsp. lactis Il1403; identical to SEQ ID NO: 133

SEQ ID NO: 3487 - DNA, 921 bp, Lactococcus lactis subsp. lactis Il1403; identical to SEQ ID NO: 134
  CDS (1)..(921): transl_table=11

SEQ ID NO: 3488 - protein, 306 aa, Lactococcus lactis subsp. lactis Il1403; identical to SEQ ID NO: 135

SEQ ID NO: 3489 - DNA, 954 bp, Deinococcus radiodurans R1; identical to SEQ ID NO: 136
  CDS (1)..(954): transl_table=11

SEQ ID NO: 3490 - protein, 317 aa, Deinococcus radiodurans R1; identical to SEQ ID NO: 137

SEQ ID NO: 3491 - DNA, 999 bp, Xylella fastidiosa 9a5c; identical to SEQ ID NO: 138
  CDS (1)..(999): transl_table=11

SEQ ID NO: 3492 - protein, 332 aa, Xylella fastidiosa 9a5c; identical to SEQ ID NO: 139

SEQ ID NO: 3493 - DNA, 921 bp, Streptococcus pneumoniae TIGR4; identical to SEQ ID NO: 140
  CDS (1)..(921): transl_table=11

SEQ ID NO: 3494 - protein, 306 aa, Streptococcus pneumoniae TIGR4; identical to SEQ ID NO: 141

SEQ ID NO: 3495 - DNA, 912 bp, Clostridium acetobutylicum ATCC 824; identical to SEQ ID NO: 142
  CDS (1)..(912): transl_table=11

SEQ ID NO: 3496 - protein, 303 aa, Clostridium acetobutylicum ATCC 824; identical to SEQ ID NO: 143

SEQ ID NO: 3497 - DNA, 930 bp, Clostridium acetobutylicum ATCC 824; identical to SEQ ID NO: 144
  CDS (1)..(930): transl_table=11

SEQ ID NO: 3498 - protein, 309 aa, Clostridium acetobutylicum ATCC 824; identical to SEQ ID NO: 145

SEQ ID NO: 3499 - DNA, 969 bp, Sinorhizobium meliloti 1021; identical to SEQ ID NO: 148
  CDS (1)..(969): transl_table=11

SEQ ID NO: 3500 - protein, 322 aa, Sinorhizobium meliloti 1021; identical to SEQ ID NO: 149

SEQ ID NO: 3501 - DNA, 924 bp, Bacillus subtilis subsp. subtilis str. 168; identical to SEQ ID NO: 152
  CDS (1)..(924): transl_table=11

SEQ ID NO: 3502 - protein, 307 aa, Bacillus subtilis subsp. subtilis str. 168; identical to SEQ ID NO: 153

SEQ ID NO: 3503 - DNA, 999 bp, Caulobacter crescentus CB15; identical to SEQ ID NO: 154
  CDS (1)..(999): transl_table=11

SEQ ID NO: 3504 - protein, 332 aa, Caulobacter crescentus CB15; identical to SEQ ID NO: 155

SEQ ID NO: 3505 - DNA, 987 bp, Caulobacter crescentus CB15; identical to SEQ ID NO: 156
  CDS (1)..(987): transl_table=11

SEQ ID NO: 3506 - protein, 328 aa, Caulobacter crescentus CB15; identical to SEQ ID NO: 157

SEQ ID NO: 3507 - DNA, 978 bp, Synechocystis sp. PCC 6803; identical to SEQ ID NO: 158
  CDS (1)..(978): transl_table=11

SEQ ID NO: 3508 - protein, 325 aa, Synechocystis sp. PCC 6803; identical to SEQ ID NO: 159

SEQ ID NO: 3509 - DNA, 996 bp, Synechocystis sp. PCC 6803; identical to SEQ ID NO: 160
  CDS (1)..(996): transl_table=11

SEQ ID NO: 3510 - protein, 331 aa, Synechocystis sp. PCC 6803; identical to SEQ ID NO: 161

SEQ ID NO: 3511 - DNA, 912 bp, Salmonella enterica subsp. enterica serovar Typhi str. CT18; identical to SEQ ID NO: 162
  CDS (1)..(912): transl_table=11

SEQ ID NO: 3512 - protein, 303 aa, Salmonella enterica subsp. enterica serovar Typhi str. CT18; identical to SEQ ID NO: 163

SEQ ID NO: 3513 - DNA, 927 bp, Listeria innocua Clip11262; identical to SEQ ID NO: 164
  CDS (1)..(927): transl_table=11

SEQ ID NO: 3514 - protein, 308 aa, Listeria innocua Clip11262; identical to SEQ ID NO: 165

SEQ ID NO: 3515 - DNA, 960 bp, Nostoc sp. PCC 7120; identical to SEQ ID NO: 166
  CDS (1)..(960): transl_table=11

SEQ ID NO: 3516 - protein, 319 aa, Nostoc sp. PCC 7120; identical to SEQ ID NO: 167

SEQ ID NO: 3517 - DNA, 975 bp, Nostoc sp. PCC 7120; identical to SEQ ID NO: 168
  CDS (1)..(975): transl_table=11

SEQ ID NO: 3518 - protein, 324 aa, Nostoc sp. PCC 7120; identical to SEQ ID NO: 169

SEQ ID NO: 3519 - DNA, 963 bp, Nostoc sp. PCC 7120; identical to SEQ ID NO: 170
  CDS (1)..(963): transl_table=11

SEQ ID NO: 3520 - protein, 320 aa, Nostoc sp. PCC 7120; identical to SEQ ID NO: 171

SEQ ID NO: 3521 - DNA, 903 bp, Ralstonia solanacearum GMI1000; identical to SEQ ID NO: 172
  CDS (1)..(903): transl_table=11

SEQ ID NO: 3522 - protein, 300 aa, Ralstonia solanacearum GMI1000; identical to SEQ ID NO: 173

SEQ ID NO: 3523 - DNA, 975 bp, Ralstonia solanacearum GMI1000; identical to SEQ ID NO: 174
  CDS (1)..(975): transl_table=11

SEQ ID NO: 3524 - protein, 324 aa, Ralstonia solanacearum GMI1000; identical to SEQ ID NO: 175

SEQ ID NO: 3525 - DNA, 1017 bp, Ralstonia solanacearum GMI1000; identical to SEQ ID NO: 176
  CDS (1)..(1017): transl_table=11

SEQ ID NO: 3526 - protein, 338 aa, Ralstonia solanacearum GMI1000; identical to SEQ ID NO: 177

SEQ ID NO: 3527 - DNA, 1029 bp, Brucella melitensis 16M; identical to SEQ ID NO: 178
  CDS (1)..(1029): transl_table=11

SEQ ID NO: 3528 - protein, 342 aa, Brucella melitensis 16M; identical to SEQ ID NO: 179

SEQ ID NO: 3529 - DNA, 909 bp, Clostridium perfringens str. 13; identical to SEQ ID NO: 180
  CDS (1)..(909): transl_table=11

SEQ ID NO: 3530 - protein, 302 aa, Clostridium perfringens str. 13; identical to SEQ ID NO: 181

SEQ ID NO: 3531 - DNA, 903 bp, Clostridium perfringens str. 13; identical to SEQ ID NO: 182
  CDS (1)..(903): transl_table=11

SEQ ID NO: 3532 - protein, 300 aa, Clostridium perfringens str. 13; identical to SEQ ID NO: 183

SEQ ID NO: 3533 - DNA, 975 bp, Arabidopsis thaliana; identical to SEQ ID NO: 184
  CDS (1)..(975)

SEQ ID NO: 3534 - protein, 324 aa, Arabidopsis thaliana; identical to SEQ ID NO: 185

SEQ ID NO: 3535 - DNA, 957 bp, Corynebacterium glutamicum ATCC 13032; identical to SEQ ID NO: 186
  CDS (1)..(957): transl_table=11

SEQ ID NO: 3536 - protein, 318 aa, Corynebacterium glutamicum ATCC 13032; identical to SEQ ID NO: 187

SEQ ID NO: 3537 - DNA, 1011 bp, Fusobacterium nucleatum subsp. nucleatum ATCC 25586; identical to SEQ ID NO: 188
  CDS (1)..(1011): transl_table=11

SEQ ID NO: 3538 - protein, 336 aa, Fusobacterium nucleatum subsp. nucleatum ATCC 25586; identical to SEQ ID NO: 189

SEQ ID NO: 3539 - DNA, 951 bp, Fusobacterium nucleatum subsp. nucleatum ATCC 25586; identical to SEQ ID NO: 190
  CDS (1)..(951): transl_table=11

SEQ ID NO: 3540 - protein, 316 aa, Fusobacterium nucleatum subsp. nucleatum ATCC 25586; identical to SEQ ID NO: 191

SEQ ID NO: 3541 - DNA, 942 bp, Streptococcus pyogenes MGAS8232; identical to SEQ ID NO: 192
  CDS (1)..(942): transl_table=11

SEQ ID NO: 3542 - protein, 313 aa, Streptococcus pyogenes MGAS8232; identical to SEQ ID NO: 193

SEQ ID NO: 3543 - DNA, 927 bp, Methanosarcina acetivorans C2A; identical to SEQ ID NO: 194
  CDS (1)..(927): transl_table=11

SEQ ID NO: 3544 - protein, 308 aa, Methanosarcina acetivorans C2A; identical to SEQ ID NO: 195

SEQ ID NO: 3545 - DNA, 921 bp, Thermoanaerobacter tengcongensis MB4; identical to SEQ ID NO: 196
  CDS (1)..(921): transl_table=11

SEQ ID NO: 3546 - protein, 306 aa, Thermoanaerobacter tengcongensis MB4; identical to SEQ ID NO: 197

SEQ ID NO: 3547 - DNA, 939 bp, Thermoanaerobacter tengcongensis MB4; identical to SEQ ID NO: 198
  CDS (1)..(939): transl_table=11

SEQ ID NO: 3548 - protein, 312 aa, Thermoanaerobacter tengcongensis MB4; identical to SEQ ID NO: 199

SEQ ID NO: 3549 - DNA, 951 bp, Streptomyces coelicolor A3(2); identical to SEQ ID NO: 200
  CDS (1)..(951): transl_table=11

SEQ ID NO: 3550 - protein, 316 aa, Streptomyces coelicolor A3(2); identical to SEQ ID NO: 201

SEQ ID NO: 3551 - DNA, 960 bp, Xanthomonas axonopodis pv. citri str. 306; identical to SEQ ID NO: 202
  CDS (1)..(960): transl_table=11

SEQ ID NO: 3552 - protein, 319 aa, Xanthomonas axonopodis pv. citri str. 306; identical to SEQ ID NO: 203

SEQ ID NO: 3553 - DNA, 933 bp, Chlorobium tepidum TLS; identical to SEQ ID NO: 204
  CDS (1)..(933): transl_table=11

SEQ ID NO: 3554 - protein, 310 aa, Chlorobium tepidum TLS; identical to SEQ ID NO: 205

SEQ ID NO: 3555 - DNA, 966 bp, Thermosynechococcus elongatus BP-1; identical to SEQ ID NO: 206
  CDS (1)..(966): transl_table=11

SEQ ID NO: 3556 - protein, 321 aa, Thermosynechococcus elongatus BP-1; identical to SEQ ID NO: 207

SEQ ID NO: 3557 - DNA, 1089 bp, Thermosynechococcus elongatus BP-1; identical to SEQ ID NO: 208
  CDS (1)..(1089): transl_table=11

SEQ ID NO: 3558 - protein, 362 aa, Thermosynechococcus elongatus BP-1; identical to SEQ ID NO: 209

SEQ ID NO: 3559 - DNA, 927 bp, Oceanobacillus iheyensis HTE831; identical to SEQ ID NO: 210
  CDS (1)..(927): transl_table=11

SEQ ID NO: 3560 - protein, 308 aa, Oceanobacillus iheyensis HTE831; identical to SEQ ID NO: 211

SEQ ID NO: 3561 - DNA, 930 bp, Oceanobacillus iheyensis HTE831; identical to SEQ ID NO: 212
  CDS (1)..(930): transl_table=11

SEQ ID NO: 3562 - protein, 309 aa, Oceanobacillus iheyensis HTE831; identical to SEQ ID NO: 213

SEQ ID NO: 3563 - DNA, 924 bp, Oceanobacillus iheyensis HTE831; identical to SEQ ID NO: 214
  CDS (1)..(924): transl_table=11

SEQ ID NO: 3564 - protein, 307 aa, Oceanobacillus iheyensis HTE831; identical to SEQ ID NO: 215

SEQ ID NO: 3565 - DNA, 912 bp, Shigella flexneri 2a str. 301; identical to SEQ ID NO: 216
  CDS (1)..(912): transl_table=11

SEQ ID NO: 3566 - protein, 303 aa, Shigella flexneri 2a str. 301; identical to SEQ ID NO: 217

SEQ ID NO: 3567 - DNA, 930 bp, Leptospira interrogans serovar Lai str. 56601; identical to SEQ ID NO: 218
  CDS (1)..(930): transl_table=11

SEQ ID NO: 3568 - protein, 309 aa, Leptospira interrogans serovar Lai str. 56601; identical to SEQ ID NO: 219

SEQ ID NO: 3569 - DNA, 969 bp, Shewanella oneidensis MR-1; identical to SEQ ID NO: 220
  CDS (1)..(969): transl_table=11

SEQ ID NO: 3570 - protein, 322 aa, Shewanella oneidensis MR-1; identical to SEQ ID NO: 221

SEQ ID NO: 3571 - DNA, 867 bp, Shewanella oneidensis MR-1; identical to SEQ ID NO: 222
  CDS (1)..(867): transl_table=11

SEQ ID NO: 3572 - protein, 288 aa, Shewanella oneidensis MR-1; identical to SEQ ID NO: 223

SEQ ID NO: 3573 - DNA, 927 bp, Streptococcus mutans UA159; identical to SEQ ID NO: 224
  CDS (1)..(927): transl_table=11

SEQ ID NO: 3574 - protein, 308 aa, Streptococcus mutans UA159; identical to SEQ ID NO: 225

SEQ ID NO: 3575 - DNA, 927 bp, Streptococcus agalactiae NEM316; identical to SEQ ID NO: 226
  CDS (1)..(927): transl_table=11

SEQ ID NO: 3576 - protein, 308 aa, Streptococcus agalactiae NEM316; identical to SEQ ID NO: 227

SEQ ID NO: 3577 - DNA, 936 bp, Corynebacterium efficiens YS-314; identical to SEQ ID NO: 228
  CDS (1)..(936): transl_table=11

SEQ ID NO: 3578 - protein, 311 aa, Corynebacterium efficiens YS-314; identical to SEQ ID NO: 229

SEQ ID NO: 3579 - DNA, 900 bp, Pseudomonas putida KT2440; identical to SEQ ID NO: 230
  CDS (1)..(900): transl_table=11

SEQ ID NO: 3580 - protein, 299 aa, Pseudomonas putida KT2440; identical to SEQ ID NO: 231

SEQ ID NO: 3581 - DNA, 975 bp, Pseudomonas putida KT2440; identical to SEQ ID NO: 232
  CDS (1)..(975): transl_table=11

SEQ ID NO: 3582 - protein, 324 aa, Pseudomonas putida KT2440; identical to SEQ ID NO: 233

SEQ ID NO: 3583 - DNA, 984 bp, Escherichia coli CFT073; identical to SEQ ID NO: 234
  CDS (1)..(984): transl_table=11
  misc_feature (887)..(887): n is a, g, c or t

SEQ ID NO: 3584 - protein, 327 aa, Escherichia coli CFT073; identical to SEQ ID NO: 235
  misc_feature (296)..(296): The Xaa at location 296 stands for Ala, Glu, Gly, or Val.

SEQ ID NO: 3585 - DNA, 918 bp, Clostridium tetani E88; identical to SEQ ID NO: 236
  CDS (1)..(918): transl_table=11

SEQ ID NO: 3586 - protein, 305 aa, Clostridium tetani E88; identical to SEQ ID NO: 237

SEQ ID NO: 3587 - DNA, 912 bp, Lactobacillus plantarum WCFS1; identical to SEQ ID NO: 238
  CDS (1)..(912): transl_table=11

SEQ ID NO: 3588 - protein, 303 aa, Lactobacillus plantarum WCFS1; identical to SEQ ID NO: 239

SEQ ID NO: 3589 - DNA, 1119 bp, Pseudomonas syringae pv. tomato str. DC3000; identical to SEQ ID NO: 240
  CDS (1)..(1119): transl_table=11

SEQ ID NO: 3590 - protein, 372 aa, Pseudomonas syringae pv. tomato str. DC3000; identical to SEQ ID NO: 241

SEQ ID NO: 3591 - DNA, 903 bp, Pseudomonas syringae pv. tomato str. DC3000; identical to SEQ ID NO: 242
  CDS (1)..(903): transl_table=11

SEQ ID NO: 3592 - protein, 300 aa, Pseudomonas syringae pv. tomato str. DC3000; identical to SEQ ID NO: 243

SEQ ID NO: 3593 - DNA, 984 bp, Pseudomonas syringae pv. tomato str. DC3000; identical to SEQ ID NO: 244
  CDS (1)..(984): transl_table=11

SEQ ID NO: 3594 - protein, 327 aa, Pseudomonas syringae pv. tomato str. DC3000; identical to SEQ ID NO: 245

SEQ ID NO: 3595 - DNA, 975 bp, Pseudomonas syringae pv. tomato str. DC3000; identical to SEQ ID NO: 246
  CDS (1)..(975): transl_table=11

SEQ ID NO: 3596 - protein, 324 aa, Pseudomonas syringae pv. tomato str. DC3000; identical to SEQ ID NO: 247

SEQ ID NO: 3597 - DNA, 969 bp, Vibrio parahaemolyticus RIMD 2210633; identical to SEQ ID NO: 248
  CDS (1)..(969): transl_table=11

SEQ ID NO: 3598 - protein, 322 aa, Vibrio parahaemolyticus RIMD 2210633; identical to SEQ ID NO: 249

SEQ ID NO: 3599 - DNA, 942 bp, Streptococcus pyogenes SSI-1; identical to SEQ ID NO: 250
  CDS (1)..(942): transl_table=11

SEQ ID NO: 3600 - protein, 313 aa, Streptococcus pyogenes SSI-1; identical to SEQ ID NO: 251

SEQ ID NO: 3601 - DNA, 918 bp, Enterococcus faecalis V583; identical to SEQ ID NO: 252
  CDS (1)..(918): transl_table=11

SEQ ID NO: 3602 - protein, 305 aa, Enterococcus faecalis V583; identical to SEQ ID NO: 253

SEQ ID NO: 3603 - DNA, 951 bp, Coxiella burnetii RSA 493; identical to SEQ ID NO: 254
  CDS (1)..(951): transl_table=11

SEQ ID NO: 3604 - protein, 316 aa, Coxiella burnetii RSA 493; identical to SEQ ID NO: 255

SEQ ID NO: 3605 - DNA, 984 bp, Streptomyces avermitilis MA-4680; identical to SEQ ID NO: 256
  CDS (1)..(984): transl_table=11

SEQ ID NO: 3606 - protein, 327 aa, Streptomyces avermitilis MA-4680; identical to SEQ ID NO: 257

SEQ ID NO: 3607 - DNA, 1029 bp, Streptomyces avermitilis MA-4680; identical to SEQ ID NO: 258
  CDS (1)..(1029): transl_table=11

SEQ ID NO: 3608 - protein, 342 aa, Streptomyces avermitilis MA-4680; identical to SEQ ID NO: 259

SEQ ID NO: 3609 - DNA, 888 bp, Nitrosomonas europaea ATCC 19718; identical to SEQ ID NO: 260
  CDS (1)..(888): transl_table=11

SEQ ID NO: 3610 - protein, 295 aa, Nitrosomonas europaea ATCC 19718; identical to SEQ ID NO: 261

SEQ ID NO: 3611 - DNA, 1302 bp, Arabidopsis thaliana; identical to SEQ ID NO: 262
  CDS (1)..(1302)

SEQ ID NO: 3612 - protein, 433 aa, Arabidopsis thaliana; identical to SEQ ID NO: 263

SEQ ID NO: 3613 - DNA, 1553 bp, Arabidopsis thaliana; identical to SEQ ID NO: 264
  CDS (72)..(1370)

SEQ ID NO: 3614 - protein, 432 aa, Arabidopsis thaliana; identical to SEQ ID NO: 265

SEQ ID NO: 3615 - DNA, 942 bp, Helicobacter hepaticus ATCC 51449; identical to SEQ ID NO: 266
  CDS (1)..(942): transl_table=11

SEQ ID NO: 3616 - protein, 313 aa, Helicobacter hepaticus ATCC 51449; identical to SEQ ID NO: 267

SEQ ID NO: 3617 - DNA, 903 bp, Helicobacter hepaticus ATCC 51449; identical to SEQ ID NO: 268
  CDS (1)..(903): transl_table=11

SEQ ID NO: 3618 - protein, 300 aa, Helicobacter hepaticus ATCC 51449; identical to SEQ ID NO: 269

SEQ ID NO: 3619 - DNA, 1050 bp, Rhodopirellula baltica SH 1; identical to SEQ ID NO: 270
  CDS (1)..(1050): transl_table=11

SEQ ID NO: 3620 - protein, 349 aa, Rhodopirellula baltica SH 1; identical to SEQ ID NO: 271

SEQ ID NO: 3621 - DNA, 960 bp, Rhodopirellula baltica SH 1; identical to SEQ ID NO: 272
  CDS (1)..(960): transl_table=11

SEQ ID NO: 3622 - protein, 319 aa, Rhodopirellula baltica SH 1; identical to SEQ ID NO: 273

SEQ ID NO: 3623 - DNA, 972 bp, Rhodopirellula baltica SH 1; identical to SEQ ID NO: 274
  CDS (1)..(972): transl_table=11

SEQ ID NO: 3624 - protein, 323 aa, Rhodopirellula baltica SH 1; identical to SEQ ID NO: 275

SEQ ID NO: 3625 - DNA, 951 bp, Haemophilus ducreyi 35000HP; identical to SEQ ID NO: 276
  CDS (1)..(951): transl_table=11

SEQ ID NO: 3626 - protein, 316 aa, Haemophilus ducreyi 35000HP; identical to SEQ ID NO: 277

SEQ ID NO: 3627 - DNA, 969 bp, Prochlorococcus marinus subsp. marinus str. CCMP1375; identical to SEQ ID NO: 278
  CDS (1)..(969): transl_table=11

SEQ ID NO: 3628 - protein, 322 aa, Prochlorococcus marinus subsp. marinus str. CCMP1375; identical to SEQ ID NO: 279

SEQ ID NO: 3629 - DNA, 987 bp, Prochlorococcus marinus subsp. marinus str. CCMP1375; identical to SEQ ID NO: 280
  CDS (1)..(987): transl_table=11

SEQ ID NO: 3630 - protein, 328 aa, Prochlorococcus marinus subsp. marinus str. CCMP1375; identical to SEQ ID NO: 281

SEQ ID NO: 3631 - DNA, 945 bp, Candidatus Blochmannia floridanus; identical to SEQ ID NO: 282
  CDS (1)..(945): transl_table=11

SEQ ID NO: 3632 - protein, 314 aa, Candidatus Blochmannia floridanus; identical to SEQ ID NO: 283

SEQ ID NO: 3633 - DNA, 912 bp, Bordetella parapertussis 12822; identical to SEQ ID NO: 284
  CDS (1)..(912): transl_table=11

SEQ ID NO: 3634 - protein, 303 aa, Bordetella parapertussis 12822; identical to SEQ ID NO: 285

SEQ ID NO: 3635 - DNA, 987 bp, Prochlorococcus marinus subsp. pastoris str. CCMP1986; identical to SEQ ID NO: 286
  CDS (1)..(987): transl_table=11

SEQ ID NO: 3636 - protein, 328 aa, Prochlorococcus marinus subsp. pastoris str. CCMP1986; identical to SEQ ID NO: 287

SEQ ID NO: 3637 - DNA, 987 bp, Prochlorococcus marinus str. MIT 9313; identical to SEQ ID NO: 288
  CDS (1)..(987): transl_table=11

SEQ ID NO: 3638 - protein, 328 aa, Prochlorococcus marinus str. MIT 9313; identical to SEQ ID NO: 289

SEQ ID NO: 3639 - DNA, 891 bp, Chromobacterium violaceum ATCC 12472; identical to SEQ ID NO: 290
  CDS (1)..(891): transl_table=11

SEQ ID NO: 3640 - protein, 296 aa, Chromobacterium violaceum ATCC 12472; identical to SEQ ID NO: 291

SEQ ID NO: 3641 - DNA, 999 bp, Wolinella succinogenes DSM 1740; identical to SEQ ID NO: 292
  CDS (1)..(999): transl_table=11

SEQ ID NO: 3642 - protein, 332 aa, Wolinella succinogenes DSM 1740; identical to SEQ ID NO: 293

SEQ ID NO: 3643 - DNA, 963 bp, Gloeobacter violaceus PCC 7421; identical to SEQ ID NO: 294
  CDS (1)..(963): transl_table=11

SEQ ID NO: 3644 - protein, 320 aa, Gloeobacter violaceus PCC 7421; identical to SEQ ID NO: 295

SEQ ID NO: 3645 - DNA, 963 bp, Gloeobacter violaceus PCC 7421; identical to SEQ ID NO: 296
  CDS (1)..(963): transl_table=11

SEQ ID NO: 3646 - protein, 320 aa, Gloeobacter violaceus PCC 7421; identical to SEQ ID NO: 297

SEQ ID NO: 3647 - DNA, 882 bp, Photorhabdus luminescens subsp. laumondii TTO1; identical to SEQ ID NO: 298
  CDS (1)..(882): transl_table=11

SEQ ID NO: 3648 - protein, 293 aa, Photorhabdus luminescens subsp. laumondii TTO1; identical to SEQ ID NO: 299

SEQ ID NO: 3649 - DNA, 954 bp, Photorhabdus luminescens subsp. laumondii TTO1; identical to SEQ ID NO: 300
  CDS (1)..(954): transl_table=11

SEQ ID NO: 3650 - protein, 317 aa, Photorhabdus luminescens subsp. laumondii TTO1; identical to SEQ ID NO: 301

SEQ ID NO: 3651 - DNA, 1029 bp, Photorhabdus luminescens subsp. laumondii TTO1; identical to SEQ ID NO: 302
  CDS (1)..(1029): transl_table=11

SEQ ID NO: 3652 - protein, 342 aa, Photorhabdus luminescens subsp. laumondii TTO1; identical to SEQ ID NO: 303

SEQ ID NO: 3653 - DNA, 969 bp, Vibrio vulnificus YJ016; identical to SEQ ID NO: 304
  CDS (1)..(969): transl_table=11

SEQ ID NO: 3654 - protein, 322 aa, Vibrio vulnificus YJ016; identical to SEQ ID NO: 305

SEQ ID NO: 3655 - DNA, 936 bp, Corynebacterium diphtheriae NCTC 13129; identical to SEQ ID NO: 306
  CDS (1)..(936): transl_table=11

SEQ ID NO: 3656 - protein, 311 aa, Corynebacterium diphtheriae NCTC 13129; identical to SEQ ID NO: 307

SEQ ID NO: 3657 - DNA, 999 bp, Rhodopseudomonas palustris CGA009; identical to SEQ ID NO: 308
  CDS (1)..(999): transl_table=11

SEQ ID NO: 3658 - protein, 332 aa, Rhodopseudomonas palustris CGA009; identical to SEQ ID NO: 309

SEQ ID NO: 3659 - DNA, 924 bp, Geobacter sulfurreducens PCA; identical to SEQ ID NO: 312
  CDS (1)..(924): transl_table=11

SEQ ID NO: 3660 - protein, 307 aa, Geobacter sulfurreducens PCA; identical to SEQ ID NO: 313

SEQ ID NO: 3661 - DNA, 990 bp, Bdellovibrio bacteriovorus HD100; identical to SEQ ID NO: 314
  CDS (1)..(990): transl_table=11

SEQ ID NO: 3662 - protein, 329 aa, Bdellovibrio bacteriovorus HD100; identical to SEQ ID NO: 315

SEQ ID NO: 3663 - DNA, 990 bp, Bdellovibrio bacteriovorus HD100; identical to SEQ ID NO: 316
  CDS (1)..(990): transl_table=11

SEQ ID NO: 3664 - protein, 329 aa, Bdellovibrio bacteriovorus HD100; identical to SEQ ID NO: 317

SEQ ID NO: 3665 - DNA, 1047 bp, Bdellovibrio bacteriovorus HD100; identical to SEQ ID NO: 318
  CDS (1)..(1047): transl_table=11

SEQ ID NO: 3666 - protein, 348 aa, Bdellovibrio bacteriovorus HD100; identical to SEQ ID NO: 319

SEQ ID NO: 3667 - DNA, 972 bp, Arabidopsis thaliana; identical to SEQ ID NO: 320
  CDS (1)..(972)

SEQ ID NO: 3668 - protein, 323 aa, Arabidopsis thaliana; identical to SEQ ID NO: 321

SEQ ID NO: 3669 - DNA, 924 bp, Bacillus cereus ATCC 10987; identical to SEQ ID NO: 322
  CDS (1)..(924): transl_table=11

SEQ ID NO: 3670 - protein, 307 aa, Bacillus cereus ATCC 10987; identical to SEQ ID NO: 323

SEQ ID NO: 3671 - DNA, 918 bp, Bacillus cereus ATCC 10987; identical to SEQ ID NO: 324
  CDS (1)..(918): transl_table=11

SEQ ID NO: 3672 - protein, 305 aa, Bacillus cereus ATCC 10987; identical to SEQ ID NO: 325

SEQ ID NO: 3673 - DNA, 1080 bp, Chlamydomonas reinhardtii; identical to SEQ ID NO: 326
  CDS (1)..(1080)

SEQ ID NO: 3674 - protein, 359 aa, Chlamydomonas reinhardtii; identical to SEQ ID NO: 327

SEQ ID NO: 3675 - DNA, 1059 bp, Chlamydomonas reinhardtii; identical to SEQ ID NO: 328
  CDS (1)..(1059)

SEQ ID NO: 3676 - protein, 352 aa, Chlamydomonas reinhardtii; identical to SEQ ID NO: 329

SEQ ID NO: 3677 - DNA, 1245 bp, Chlamydomonas reinhardtii; identical to SEQ ID NO: 330
  CDS (1)..(1245)

SEQ ID NO: 3678 - protein, 414 aa, Chlamydomonas reinhardtii; identical to SEQ ID NO: 331

SEQ ID NO: 3679 - DNA, 1149 bp, Chlamydomonas reinhardtii; identical to SEQ ID NO: 332
  CDS (1)..(1149)

SEQ ID NO: 3680 - protein, 382 aa, Chlamydomonas reinhardtii; identical to SEQ ID NO: 333

SEQ ID NO: 3681 - DNA, 1164 bp, Chlamydomonas reinhardtii; identical to SEQ ID NO: 334
  CDS (1)..(1164)

SEQ ID NO: 3682 - protein, 387 aa, Chlamydomonas reinhardtii; identical to SEQ ID NO: 335

SEQ ID NO: 3683 - DNA, 1047 bp, Physcomitrella patens subsp. patens; identical to SEQ ID NO: 336
  CDS (1)..(1047)

SEQ ID NO: 3684 - protein, 348 aa, Physcomitrella patens subsp. patens; identical to SEQ ID NO: 337

SEQ ID NO: 3685 - DNA, 1191 bp, Physcomitrella patens subsp. patens; identical to SEQ ID NO: 338
  CDS (1)..(1191)

SEQ ID NO: 3686 - protein, 396 aa, Physcomitrella patens subsp. patens; identical to SEQ ID NO: 339

SEQ ID NO: 3687 - DNA, 945 bp, Physcomitrella patens subsp. patens; identical to SEQ ID NO: 340
  CDS (1)..(945)

SEQ ID NO: 3688 - protein, 314 aa, Physcomitrella patens subsp. patens; identical to SEQ ID NO: 341

SEQ ID NO: 3689 - DNA, 1338 bp, Gibberella zeae PH-1; identical to SEQ ID NO: 342
  CDS (1)..(1338)

SEQ ID NO: 3690 - protein, 445 aa, Gibberella zeae PH-1; identical to SEQ ID NO: 343

SEQ ID NO: 3691 - DNA, 1554 bp, Gibberella zeae PH-1; identical to SEQ ID NO: 344
  CDS (1)..(1554)

SEQ ID NO: 3692 - protein, 517 aa, Gibberella zeae PH-1; identical to SEQ ID NO: 345

SEQ ID NO: 3693 - DNA, 1116 bp, Gibberella zeae PH-1; identical to SEQ ID NO: 346
  CDS (1)..(1116)

SEQ ID NO: 3694 - protein, 371 aa, Gibberella zeae PH-1; identical to SEQ ID NO: 347

SEQ ID NO: 3695 - DNA, 1476 bp, Debaryomyces hansenii CBS767; identical to SEQ ID NO: 348
  CDS (1)..(1476)

SEQ ID NO: 3696 - protein, 491 aa, Debaryomyces hansenii CBS767; identical to SEQ ID NO: 349

SEQ ID NO: 3697 - DNA, 1287 bp, Aspergillus nidulans FGSC A4; identical to SEQ ID NO: 350
  CDS (1)..(1287)

SEQ ID NO: 3698 - protein, 428 aa, Aspergillus nidulans FGSC A4; identical to SEQ ID NO: 351

SEQ ID NO: 3699 - DNA, 1608 bp, Aspergillus nidulans FGSC A4; identical to SEQ ID NO: 352
  CDS (1)..(1608)

SEQ ID NO: 3700 - protein, 535 aa, Aspergillus nidulans FGSC A4; identical to SEQ ID NO: 353

SEQ ID NO: 3701 - DNA, 1491 bp, Candida albicans SC5314; identical to SEQ ID NO: 354
  CDS (1)..(1491): transl_table=12

SEQ ID NO: 3702 - protein, 496 aa, Candida albicans SC5314; identical to SEQ ID NO: 355

SEQ ID NO: 3703 - DNA, 1098 bp, Strongylocentrotus purpuratus; identical to SEQ ID NO: 360
  CDS (1)..(1098)

SEQ ID NO: 3704 - protein, 365 aa, Strongylocentrotus purpuratus; identical to SEQ ID NO: 361

SEQ ID NO: 3705 - DNA, 969 bp, Prochlorococcus marinus str. MIT 9515; identical to SEQ ID NO: 362
  CDS (1)..(969): transl_table=11

SEQ ID NO: 3706 - protein, 322 aa, Prochlorococcus marinus str. MIT 9515; identical to SEQ ID NO: 363

SEQ ID NO: 3707 - DNA, 987 bp, Prochlorococcus marinus str. MIT 9515; identical to SEQ ID NO: 364
  CDS (1)..(987): transl_table=11

SEQ ID NO: 3708 - protein, 328 aa, Prochlorococcus marinus str. MIT 9515; identical to SEQ ID NO: 365

SEQ ID NO: 3709 - DNA, 987 bp, Prochlorococcus marinus str. MIT 9303; identical to SEQ ID NO: 366
  CDS (1)..(987): transl_table=11

SEQ ID NO: 3710 - protein, 328 aa, Prochlorococcus marinus str. MIT 9303; identical to SEQ ID NO: 367

SEQ ID NO: 3711 - DNA, 987 bp, Prochlorococcus marinus str. MIT 9303; identical to SEQ ID NO: 368
  CDS (1)..(987): transl_table=11

SEQ ID NO: 3712 - protein, 328 aa, Prochlorococcus marinus str. MIT 9303; identical to SEQ ID NO: 369

SEQ ID NO: 3713 - DNA, 909 bp, Clostridium thermocellum ATCC 27405; identical to SEQ ID NO: 370
  CDS (1)..(909): transl_table=11

SEQ ID NO: 3714 - protein, 302 aa, Clostridium thermocellum ATCC 27405; identical to SEQ ID NO: 371

SEQ ID NO: 3715 - DNA, 936 bp, Clostridium thermocellum ATCC 27405; identical to SEQ ID NO: 372
  CDS (1)..(936): transl_table=11

SEQ ID NO: 3716 - protein, 311 aa, Clostridium thermocellum ATCC 27405; identical to SEQ ID NO: 373

SEQ ID NO: 3717 - DNA, 909 bp, Clostridium difficile 630; identical to SEQ ID NO: 374
  CDS (1)..(909): transl_table=11

SEQ ID NO: 3718 - protein, 302 aa, Clostridium difficile 630; identical to SEQ ID NO: 375

SEQ ID NO: 3719 - DNA, 963 bp, Clostridium difficile 630; identical to SEQ ID NO: 376
  CDS (1)..(963): transl_table=11

SEQ ID NO: 3720 - protein, 320 aa, Clostridium difficile 630; identical to SEQ ID NO: 377

SEQ ID NO: 3721 - DNA, 969 bp, Prochlorococcus marinus str. MIT 9301; identical to SEQ ID NO: 378
  CDS (1)..(969): transl_table=11

SEQ ID NO: 3722 - protein, 322 aa, Prochlorococcus marinus str. MIT 9301; identical to SEQ ID NO: 379

SEQ ID NO: 3723 - DNA, 987 bp, Prochlorococcus marinus str. MIT 9301; identical to SEQ ID NO: 380
  CDS (1)..(987): transl_table=11

SEQ ID NO: 3724 - protein, 328 aa, Prochlorococcus marinus str. MIT 9301; identical to SEQ ID NO: 381

SEQ ID NO: 3725 - DNA, 903 bp, Herminiimonas arsenicoxydans; identical to SEQ ID NO: 382
  CDS (1)..(903): transl_table=11

SEQ ID NO: 3726 - protein, 300 aa, Herminiimonas arsenicoxydans; identical to SEQ ID NO: 383

SEQ ID NO: 3727 - DNA, 1035 bp, Bradyrhizobium sp. ORS278; identical to SEQ ID NO: 384
  CDS (1)..(1035): transl_table=11

SEQ ID NO: 3728 - protein, 344 aa, Bradyrhizobium sp. ORS278; identical to SEQ ID NO: 385

SEQ ID NO: 3729 - DNA, 969 bp, Bradyrhizobium sp. ORS278; identical to SEQ ID NO: 386
  CDS (1)..(969): transl_table=11

SEQ ID NO: 3730 - protein, 322 aa, Bradyrhizobium sp. ORS278; identical to SEQ ID NO: 387

SEQ ID NO: 3731 - DNA, 972 bp, Klebsiella pneumoniae subsp. pneumoniae MGH 78578; identical to SEQ ID NO: 388
  CDS (1)..(972): transl_table=11

SEQ ID NO: 3732 - protein, 323 aa, Klebsiella pneumoniae subsp. pneumoniae MGH 78578; identical to SEQ ID NO: 389

SEQ ID NO: 3733 - DNA, 912 bp, Klebsiella pneumoniae subsp. pneumoniae MGH 78578; identical to SEQ ID NO: 390
  CDS (1)..(912): transl_table=11

SEQ ID NO: 3734 - protein, 303 aa, Klebsiella pneumoniae subsp. pneumoniae MGH 78578; identical to SEQ ID NO: 391

SEQ ID NO: 3735 - DNA, 987 bp, Xanthobacter autotrophicus Py2; identical to SEQ ID NO: 392
  CDS (1)..(987): transl_table=11

SEQ ID NO: 3736 - protein, 328 aa, Xanthobacter autotrophicus Py2; identical to SEQ ID NO: 393

SEQ ID NO: 3737 - DNA, 1029 bp, Xanthobacter autotrophicus Py2; identical to SEQ ID NO: 394
  CDS (1)..(1029): transl_table=11

SEQ ID NO: 3738 - protein, 342 aa, Xanthobacter autotrophicus Py2; identical to SEQ ID NO: 395

SEQ ID NO: 3739 - DNA, 969 bp, Prochlorococcus marinus str. MIT 9215; identical to SEQ ID NO: 396
  CDS (1)..(969): transl_table=11

SEQ ID NO: 3740 - protein, 322 aa, Prochlorococcus marinus str. MIT 9215; identical to SEQ ID NO: 397

SEQ ID NO: 3741 - DNA, 969 bp, Prochlorococcus marinus str. MIT 9211; identical to SEQ ID NO: 398
  CDS (1)..(969): transl_table=11

SEQ ID NO: 3742 - protein, 322 aa, Prochlorococcus marinus str. MIT 9211; identical to SEQ ID NO: 399

SEQ ID NO: 3743 - DNA, 987 bp, Prochlorococcus marinus str. MIT 9211; identical to SEQ ID NO: 400
  CDS (1)..(987): transl_table=11

SEQ ID NO: 3744 - protein, 328 aa, Prochlorococcus marinus str. MIT 9211; identical to SEQ ID NO: 401

SEQ ID NO: 3745 - DNA, 975 bp, Pseudomonas putida GB-1; identical to SEQ ID NO: 402
  CDS (1)..(975): transl_table=11

SEQ ID NO: 3746 - protein, 324 aa, Pseudomonas putida GB-1; identical to SEQ ID NO: 403

SEQ ID NO: 3747 - DNA, 915 bp, Thermus thermophilus HB27; identical to SEQ ID NO: 404
  CDS (1)..(915): transl_table=11

SEQ ID NO: 3748 - protein, 304 aa, Thermus thermophilus HB27; identical to SEQ ID NO: 405

SEQ ID NO: 3749 - DNA, 927 bp, Desulfovibrio vulgaris subsp. vulgaris str. Hildenborough; identical to SEQ ID NO: 406
  CDS (1)..(927): transl_table=11

SEQ ID NO: 3750 - protein, 308 aa, Desulfovibrio vulgaris subsp. vulgaris str. Hildenborough; identical to SEQ ID NO: 407

SEQ ID NO: 3751 - DNA, 951 bp, Picrophilus torridus DSM 9790; identical to SEQ ID NO: 408
  CDS (1)..(951): transl_table=11

SEQ ID NO: 3752 - protein, 316 aa, Picrophilus torridus DSM 9790; identical to SEQ ID NO: 409

SEQ ID NO: 3753 - DNA, 918 bp, Bacillus thuringiensis serovar konkukian str. 97-27; identical to SEQ ID NO: 410
  CDS (1)..(918): transl_table=11

SEQ ID NO: 3754 - protein, 305 aa, Bacillus thuringiensis serovar konkukian str. 97-27; identical to SEQ ID NO: 411

SEQ ID NO: 3755 - DNA, 999 bp, Acinetobacter sp. ADP1; identical to SEQ ID NO: 412
  CDS (1)..(999): transl_table=11

SEQ ID NO: 3756 - protein, 332 aa, Acinetobacter sp. ADP1; identical to SEQ ID NO: 413

SEQ ID NO: 3757 - DNA, 924 bp, Acinetobacter sp. ADP1; identical to SEQ ID NO: 414
  CDS (1)..(924): transl_table=11

SEQ ID NO: 3758 - protein, 307 aa, Acinetobacter sp. ADP1; identical to SEQ ID NO: 415

SEQ ID NO: 3759 - DNA, 882 bp, Pectobacterium atrosepticum SCRI1043; identical to SEQ ID NO: 416
  CDS (1)..(882): transl_table=11

SEQ ID NO: 3760 - protein, 293 aa, Pectobacterium atrosepticum SCRI1043; identical to SEQ ID NO: 417

SEQ ID NO: 3761 - DNA, 969 bp, Pectobacterium atrosepticum SCRI1043; identical to SEQ ID NO: 418
  CDS (1)..(969): transl_table=11

SEQ ID NO: 3762 - protein, 322 aa, Pectobacterium atrosepticum SCRI1043; identical to SEQ ID NO: 419

SEQ ID NO: 3763 - DNA, 936 bp, Propionibacterium acnes KPA171202; identical to SEQ ID NO: 420
  CDS (1)..(936): transl_table=11

SEQ ID NO: 3764 - protein, 311 aa, Propionibacterium acnes KPA171202; identical to SEQ ID NO: 421

SEQ ID NO: 3765 - DNA, 921 bp, Desulfotalea psychrophila LSv54; identical to SEQ ID NO: 422
  CDS (1)..(921): transl_table=11

SEQ ID NO: 3766 - protein, 306 aa, Desulfotalea psychrophila LSv54; identical to SEQ ID NO: 423

SEQ ID NO: 3767 - DNA, 969 bp, Yersinia pseudotuberculosis IP 32953; identical to SEQ ID NO: 424
  CDS (1)..(969): transl_table=11

SEQ ID NO: 3768 - protein, 322 aa, Yersinia pseudotuberculosis IP 32953; identical to SEQ ID NO: 425

SEQ ID NO: 3769 - DNA, 894 bp, Yersinia pseudotuberculosis IP 32953; identical to SEQ ID NO: 426
  CDS (1)..(894): transl_table=11

SEQ ID NO: 3770 - protein, 297 aa, Yersinia pseudotuberculosis IP 32953; identical to SEQ ID NO: 427

SEQ ID NO: 3771 - DNA, 936 bp, Symbiobacterium thermophilum IAM 14863; identical to SEQ ID NO: 428
  CDS (1)..(936): transl_table=11

SEQ ID NO: 3772 - protein, 311 aa, Symbiobacterium thermophilum IAM 14863; identical to SEQ ID NO: 429

SEQ ID NO: 3773 - DNA, 924 bp, Bacillus cereus E33L; identical to SEQ ID NO: 430
  CDS (1)..(924): transl_table=11

SEQ ID NO: 3774 - protein, 307 aa, Bacillus cereus E33L; identical to SEQ ID NO: 431

SEQ ID NO: 3775 - DNA, 924 bp, Bacillus cereus E33L; identical to SEQ ID NO: 434
  CDS (1)..(924): transl_table=11

SEQ ID NO: 3776 - protein, 307 aa, Bacillus cereus E33L; identical to SEQ ID NO: 435

SEQ ID NO: 3777 - DNA, 951 bp, Mannheimia succiniciproducens MBEL55E; identical to SEQ ID NO: 436
  CDS (1)..(951): transl_table=11

SEQ ID NO: 3778 - protein, 316 aa, Mannheimia succiniciproducens MBEL55E; identical to SEQ ID NO: 437

SEQ ID NO: 3779 - DNA, 924 bp, Bacillus licheniformis ATCC 14580; identical to SEQ ID NO: 438
  CDS (1)..(924): transl_table=11

SEQ ID NO: 3780 - protein, 307 aa, Bacillus licheniformis ATCC 14580; identical to SEQ ID NO: 439

SEQ ID NO: 3781 - DNA, 924 bp, Bacillus licheniformis ATCC 14580; identical to SEQ ID NO: 440
  CDS (1)..(924): transl_table=11

SEQ ID NO: 3782 - protein, 307 aa, Bacillus licheniformis ATCC 14580; identical to SEQ ID NO: 441

SEQ ID NO: 3783 - DNA, 933 bp, Bacillus licheniformis ATCC 14580; identical to SEQ ID NO: 442
  CDS (1)..(933): transl_table=11

SEQ ID NO: 3784 - protein, 310 aa, Bacillus licheniformis ATCC 14580; identical to SEQ ID NO: 443

SEQ ID NO: 3785 - DNA, 951 bp, Legionella pneumophila subsp. pneumophila str. Philadelphia 1; identical to SEQ ID NO: 444
  CDS (1)..(951): transl_table=11

SEQ ID NO: 3786 - protein, 316 aa, Legionella pneumophila subsp. pneumophila str. Philadelphia 1; identical to SEQ ID NO: 445

SEQ ID NO: 3787 - DNA, 933 bp, Methylococcus capsulatus str. Bath; identical to SEQ ID NO: 446
  CDS (1)..(933): transl_table=11

SEQ ID NO: 3788 - protein, 310 aa, Methylococcus capsulatus str. Bath; identical to SEQ ID NO: 447

SEQ ID NO: 3789 - DNA, 888 bp, Methylococcus capsulatus str. Bath; identical to SEQ ID NO: 448
  CDS (1)..(888): transl_table=11

SEQ ID NO: 3790 - protein, 295 aa, Methylococcus capsulatus str. Bath; identical to SEQ ID NO: 449

SEQ ID NO: 3791 - DNA, 891 bp, Azoarcus sp. EbN1; identical to SEQ ID NO: 450
  CDS (1)..(891): transl_table=11

SEQ ID NO: 3792 - protein, 296 aa, Azoarcus sp. EbN1; identical to SEQ ID NO: 451

SEQ ID NO: 3793 - DNA, 1065 bp, Silicibacter pomeroyi DSS-3; identical to SEQ ID NO: 452
  CDS (1)..(1065): transl_table=11

SEQ ID NO: 3794 - protein, 354 aa, Silicibacter pomeroyi DSS-3; identical to SEQ ID NO: 453

SEQ ID NO: 3795 - DNA, 939 bp, Bacillus clausii KSM-K16; identical to SEQ ID NO: 454
  CDS (1)..(939): transl_table=11

SEQ ID NO: 3796 - protein, 312 aa, Bacillus clausii KSM-K16; identical to SEQ ID NO: 455

SEQ ID NO: 3797 - DNA, 927 bp, Bacillus clausii KSM-K16; identical to SEQ ID NO: 456
  CDS (1)..(927): transl_table=11

SEQ ID NO: 3798 - protein, 308 aa, Bacillus clausii KSM-K16; identical to SEQ ID NO: 457

SEQ ID NO: 3799 - DNA, 933 bp, Bacillus clausii KSM-K16; identical to SEQ ID NO: 458
  CDS (1)..(933): transl_table=11

SEQ ID NO: 3800 - protein, 310 aa, Bacillus clausii KSM-K16; identical to SEQ ID NO: 459

SEQ ID NO: 3801 - DNA, 963 bp, Dehalococcoides ethenogenes 195; identical to SEQ ID NO: 460
  CDS (1)..(963): transl_table=11

SEQ ID NO: 3802 - protein, 320 aa, Dehalococcoides ethenogenes 195; identical to SEQ ID NO: 461

SEQ ID NO: 3803 - DNA, 948 bp, Staphylococcus aureus subsp. aureus COL; identical to SEQ ID NO: 462
  CDS (1)..(948): transl_table=11

SEQ ID NO: 3804 - protein, 315 aa, Staphylococcus aureus subsp. aureus COL; identical to SEQ ID NO: 463

SEQ ID NO: 3805 - DNA, 909 bp, Staphylococcus epidermidis RP62A; identical to SEQ ID NO: 464
  CDS (1)..(909): transl_table=11

SEQ ID NO: 3806 - protein, 302 aa, Staphylococcus epidermidis RP62A; identical to SEQ ID NO: 465

SEQ ID NO: 3807 - DNA, 933 bp, Neisseria gonorrhoeae FA 1090; identical to SEQ ID NO: 466
  CDS (1)..(933): transl_table=11

SEQ ID NO: 3808 - protein, 310 aa, Neisseria gonorrhoeae FA 1090; identical to SEQ ID NO: 467

SEQ ID NO: 3809 - DNA, 951 bp, Bacteroides fragilis NCTC 9343; identical to SEQ ID NO: 468
  CDS (1)..(951): transl_table=11

SEQ ID NO: 3810 - protein, 316 aa, Bacteroides fragilis NCTC 9343; identical to SEQ ID NO: 469

SEQ ID NO: 3811 - DNA, 948 bp, Bacteroides fragilis NCTC 9343; identical to SEQ ID NO: 470
  CDS (1)..(948): transl_table=11

SEQ ID NO: 3812 - protein, 315 aa, Bacteroides fragilis NCTC 9343; identical to SEQ ID NO: 471

SEQ ID NO: 3813 - DNA, 1110 bp, Pseudomonas fluorescens Pf-5; identical to SEQ ID NO: 472
  CDS (1)..(1110): transl_table=11

SEQ ID NO: 3814 - protein, 369 aa, Pseudomonas fluorescens Pf-5; identical to SEQ ID NO: 473

SEQ ID NO: 3815 - DNA, 957 bp, Psychrobacter arcticus 273-4; identical to SEQ ID NO: 474
  CDS (1)..(957): transl_table=11

SEQ ID NO: 3816 - protein, 318 aa, Psychrobacter arcticus 273-4; identical to SEQ ID NO: 475

SEQ ID NO: 3817 - DNA, 981 bp, Colwellia psychrerythraea 34H; identical to SEQ ID NO: 476
  CDS (1)..(981): transl_table=11

SEQ ID NO: 3818 - protein, 326 aa, Colwellia psychrerythraea 34H; identical to SEQ ID NO: 477

SEQ ID NO: 3819 - DNA, 975 bp, Pseudomonas syringae pv. phaseolicola 1448A; identical to SEQ ID NO: 478
  CDS (1)..(975): transl_table=11

SEQ ID NO: 3820 - protein, 324 aa, Pseudomonas syringae pv. phaseolicola 1448A; identical to SEQ ID NO: 479

SEQ ID NO: 3821 - DNA, 942 bp, Pseudomonas syringae pv. phaseolicola 1448A; identical to SEQ ID NO: 480
  CDS (1)..(942): transl_table=11

SEQ ID NO: 3822 - protein, 313 aa, Pseudomonas syringae pv. phaseolicola 1448A; identical to SEQ ID NO: 481

SEQ ID NO: 3823 - DNA, 900 bp, Dechloromonas aromatica RCB; identical to SEQ ID NO: 482
  CDS (1)..(900): transl_table=11

SEQ ID NO: 3824 - protein, 299 aa, Dechloromonas aromatica RCB; identical to SEQ ID NO: 483

SEQ ID NO: 3825 - DNA, 975 bp, Dechloromonas aromatica RCB; identical to SEQ ID NO: 484
  CDS (1)..(975): transl_table=11

SEQ ID NO: 3826 - protein, 324 aa, Dechloromonas aromatica RCB; identical to SEQ ID NO: 485

SEQ ID NO: 3827 - DNA, 933 bp, Dechloromonas aromatica RCB; identical to SEQ ID NO: 486
  CDS (1)..(933): transl_table=11

SEQ ID NO: 3828 - protein, 310 aa, Dechloromonas aromatica RCB; identical to SEQ ID NO: 487

SEQ ID NO: 3829 - DNA, 948 bp, Thermobifida fusca YX; identical to SEQ ID NO: 488
  CDS (1)..(948): transl_table=11

SEQ ID NO: 3830 - protein, 315 aa, Thermobifida fusca YX; identical to SEQ ID NO: 489

SEQ ID NO: 3831 - DNA, 969 bp, Prochlorococcus marinus str. NATL2A; identical to SEQ ID NO: 490
  CDS (1)..(969): transl_table=11

SEQ ID NO: 3832 - protein, 322 aa, Prochlorococcus marinus str. NATL2A; identical to SEQ ID NO: 491

SEQ ID NO: 3833 - DNA, 987 bp, Prochlorococcus marinus str. NATL2A; identical to SEQ ID NO: 492
  CDS (1)..(987): transl_table=11

SEQ ID NO: 3834 - protein, 328 aa, Prochlorococcus marinus str. NATL2A; identical to SEQ ID NO: 493

SEQ ID NO: 3835 - DNA, 1005 bp, Ralstonia eutropha JMP134; identical to SEQ ID NO: 494
  CDS (1)..(1005): transl_table=11

SEQ ID NO: 3836 - protein, 334 aa, Ralstonia eutropha JMP134; identical to SEQ ID NO: 495

SEQ ID NO: 3837 - DNA, 918 bp, Ralstonia eutropha JMP134; identical to SEQ ID NO: 496
  CDS (1)..(918): transl_table=11

SEQ ID NO: 3838 - protein, 305 aa, Ralstonia eutropha JMP134; identical to SEQ ID NO: 497

SEQ ID NO: 3839 - DNA, 894 bp, Thiobacillus denitrificans ATCC 25259; identical to SEQ ID NO: 498
  CDS (1)..(894): transl_table=11

SEQ ID NO: 3840 - protein, 297 aa, Thiobacillus denitrificans ATCC 25259; identical to SEQ ID NO: 499

SEQ ID NO: 3841 - DNA, 1386 bp, Anabaena variabilis ATCC 29413; identical to SEQ ID NO: 500
  CDS (1)..(1386): transl_table=11

SEQ ID NO: 3842 - protein, 461 aa, Anabaena variabilis ATCC 29413; identical to SEQ ID NO: 501

SEQ ID NO: 3843 - DNA, 963 bp, Anabaena variabilis ATCC 29413; identical to SEQ ID NO: 502
  CDS (1)..(963): transl_table=11

SEQ ID NO: 3844 - protein, 320 aa, Anabaena variabilis ATCC 29413; identical to SEQ ID NO: 503

SEQ ID NO: 3845 - DNA, 975 bp, Pseudomonas fluorescens PfO-1; identical to SEQ ID NO: 504
  CDS (1)..(975): transl_table=11

SEQ ID NO: 3846 - protein, 324 aa, Pseudomonas fluorescens PfO-1; identical to SEQ ID NO: 505

SEQ ID NO: 3847 - DNA, 942 bp, Pseudomonas fluorescens PfO-1; identical to SEQ ID NO: 506
  CDS (1)..(942): transl_table=11

SEQ ID NO: 3848 - protein, 313 aa, Pseudomonas fluorescens PfO-1; identical to SEQ ID NO: 507

SEQ ID NO: 3849 - DNA, 1077 bp, Rhodobacter sphaeroides 2.4.1; identical to SEQ ID NO: 508
  CDS (1)..(1077): transl_table=11

SEQ ID NO: 3850 - protein, 358 aa, Rhodobacter sphaeroides 2.4.1; identical to SEQ ID NO: 509

SEQ ID NO: 3851 - DNA, 921 bp, Carboxydothermus hydrogenoformans Z-2901; identical to SEQ ID NO: 510
  CDS (1)..(921): transl_table=11

SEQ ID NO: 3852 - protein, 306 aa, Carboxydothermus hydrogenoformans Z-2901; identical to SEQ ID NO: 511

SEQ ID NO: 3853 - DNA, 903 bp, Burkholderia sp. 383; identical to SEQ ID NO: 512
  CDS (1)..(903): transl_table=11

SEQ ID NO: 3854 - protein, 300 aa, Burkholderia sp. 383; identical to SEQ ID NO: 513

SEQ ID NO: 3855 - DNA, 978 bp, Burkholderia sp. 383; identical to SEQ ID NO: 514
  CDS (1)..(978): transl_table=11

SEQ ID NO: 3856 - protein, 325 aa, Burkholderia sp. 383; identical to SEQ ID NO: 515

SEQ ID NO: 3857 - DNA, 987 bp, Synechococcus sp. CC9605; identical to SEQ ID NO: 516
  CDS (1)..(987): transl_table=11

SEQ ID NO: 3858 - protein, 328 aa, Synechococcus sp. CC9605; identical to SEQ ID NO: 517

SEQ ID NO: 3859 - DNA, 969 bp, Synechococcus sp. CC9605; identical to SEQ ID NO: 518
  CDS (1)..(969): transl_table=11

SEQ ID NO: 3860 - protein, 322 aa, Synechococcus sp. CC9605; identical to SEQ ID NO: 519

SEQ ID NO: 3861 - DNA, 927 bp, Geobacter metallireducens GS-15; identical to SEQ ID NO: 520
  CDS (1)..(927): transl_table=11

SEQ ID NO: 3862 - protein, 308 aa, Geobacter metallireducens GS-15; identical to SEQ ID NO: 521

SEQ ID NO: 3863 - DNA, 930 bp, Geobacter metallireducens GS-15; identical to SEQ ID NO: 522
  CDS (1)..(930): transl_table=11

SEQ ID NO: 3864 - protein, 309 aa, Geobacter metallireducens GS-15; identical to SEQ ID NO: 523

SEQ ID NO: 3865 - DNA, 924 bp, Geobacter metallireducens GS-15; identical to SEQ ID NO: 524
  CDS (1)..(924): transl_table=11

SEQ ID NO: 3866 - protein, 307 aa, Geobacter metallireducens GS-15; identical to SEQ ID NO: 525

SEQ ID NO: 3867 - DNA, 930 bp, Desulfovibrio desulfuricans G20; identical to SEQ ID NO: 526
  CDS (1)..(930): transl_table=11

SEQ ID NO: 3868 - protein, 309 aa, Desulfovibrio desulfuricans G20; identical to SEQ ID NO: 527

SEQ ID NO: 3869 - DNA, 969 bp, Prochlorococcus marinus str. MIT 9312; identical to SEQ ID NO: 528
  CDS (1)..(969): transl_table=11

SEQ ID NO: 3870 - protein, 322 aa, Prochlorococcus marinus str. MIT 9312; identical to SEQ ID NO: 529

SEQ ID NO: 3871 - DNA, 987 bp, Prochlorococcus marinus str. MIT 9312; identical to SEQ ID NO: 530
  CDS (1)..(987): transl_table=11

SEQ ID NO: 3872 - protein, 328 aa, Prochlorococcus marinus str. MIT 9312; identical to SEQ ID NO: 531

SEQ ID NO: 3873 - DNA, 990 bp, Synechococcus elongatus PCC 7942; identical to SEQ ID NO: 532
  CDS (1)..(990): transl_table=11

SEQ ID NO: 3874 - protein, 329 aa, Synechococcus elongatus PCC 7942; identical to SEQ ID NO: 533

SEQ ID NO: 3875 - DNA, 1119 bp, Synechococcus elongatus PCC 7942; identical to SEQ ID NO: 534
  CDS (1)..(1119): transl_table=11

SEQ ID NO: 3876 - protein, 372 aa, Synechococcus elongatus PCC 7942; identical to SEQ ID NO: 535

SEQ ID NO: 3877 - DNA, 1005 bp, Synechococcus elongatus PCC 7942; identical to SEQ ID NO: 536
  CDS (1)..(1005): transl_table=11

SEQ ID NO: 3878 - protein, 334 aa, Synechococcus elongatus PCC 7942; identical to SEQ ID NO: 537

SEQ ID NO: 3879 - DNA, 1365 bp, Rhodospirillum rubrum ATCC 11170; identical to SEQ ID NO: 538
  CDS (1)..(1365): transl_table=11

SEQ ID NO: 3880 - protein, 454 aa, Rhodospirillum rubrum ATCC 11170; identical to SEQ ID NO: 539

SEQ ID NO: 3881 - DNA, 984 bp, Rhodospirillum rubrum ATCC 11170; identical to SEQ ID NO: 540
  CDS (1)..(984): transl_table=11

SEQ ID NO: 3882 - protein, 327 aa, Rhodospirillum rubrum ATCC 11170; identical to SEQ ID NO: 541

SEQ ID NO: 3883 - DNA, 921 bp, Moorella thermoacetica ATCC 39073; identical to SEQ ID NO: 542
  CDS (1)..(921): transl_table=11

SEQ ID NO: 3884 - protein, 306 aa, Moorella thermoacetica ATCC 39073; identical to SEQ ID NO: 543

SEQ ID NO: 3885 - DNA, 927 bp, Moorella thermoacetica ATCC 39073; identical to SEQ ID NO: 544
  CDS (1)..(927): transl_table=11

SEQ ID NO: 3886 - protein, 308 aa, Moorella thermoacetica ATCC 39073; identical to SEQ ID NO: 545

SEQ ID NO: 3887 - DNA, 903 bp, Burkholderia thailandensis E264; identical to SEQ ID NO: 546
  CDS (1)..(903): transl_table=11

SEQ ID NO: 3888 - protein, 300 aa, Burkholderia thailandensis E264; identical to SEQ ID NO: 547

SEQ ID NO: 3889 - DNA, 888 bp, Syntrophus aciditrophicus SB; identical to SEQ ID NO: 548
  CDS (1)..(888): transl_table=11

SEQ ID NO: 3890 - protein, 295 aa, Syntrophus aciditrophicus SB; identical to SEQ ID NO: 549

SEQ ID NO: 3891 - DNA, 978 bp, Syntrophus aciditrophicus SB; identical to SEQ ID NO: 550
  CDS (1)..(978): transl_table=11

SEQ ID NO: 3892 - protein, 325 aa, Syntrophus aciditrophicus SB; identical to SEQ ID NO: 551

SEQ ID NO: 3893 - DNA, 948 bp, Frankia sp. CcI3; identical to SEQ ID NO: 552
  CDS (1)..(948): transl_table=11

SEQ ID NO: 3894 - protein, 315 aa, Frankia sp. CcI3; identical to SEQ ID NO: 553

SEQ ID NO: 3895 - DNA, 930 bp, Frankia sp. CcI3; identical to SEQ ID NO: 554
  CDS (1)..(930): transl_table=11

SEQ ID NO: 3896 - protein, 309 aa, Frankia sp. CcI3; identical to SEQ ID NO: 555

SEQ ID NO: 3897 - DNA, 999 bp, Novosphingobium aromaticivorans DSM 12444; identical to SEQ ID NO: 556
  CDS (1)..(999): transl_table=11

SEQ ID NO: 3898 - protein, 332 aa, Novosphingobium aromaticivorans DSM 12444; identical to SEQ ID NO: 557

SEQ ID NO: 3899 - DNA, 918 bp, Novosphingobium aromaticivorans DSM 12444; identical to SEQ ID NO: 558
  CDS (1)..(918): transl_table=11

SEQ ID NO: 3900 - protein, 305 aa, Novosphingobium aromaticivorans DSM 12444; identical to SEQ ID NO: 559

SEQ ID NO: 3901 - DNA, 915 bp, Staphylococcus aureus subsp. aureus NCTC 8325; identical to SEQ ID NO: 560
  CDS (1)..(915): transl_table=11

SEQ ID NO: 3902 - protein, 304 aa, Staphylococcus aureus subsp. aureus NCTC 8325; identical to SEQ ID NO: 561

SEQ ID NO: 3903 - DNA, 954 bp, Desulfitobacterium hafniense Y51; identical to SEQ ID NO: 562
  CDS (1)..(954): transl_table=11

SEQ ID NO: 3904 - protein, 317 aa, Desulfitobacterium hafniense Y51; identical to SEQ ID NO: 563

SEQ ID NO: 3905 - DNA, 891 bp, Saccharophagus degradans 2-40; identical to SEQ ID NO: 564
  CDS (1)..(891): transl_table=11

SEQ ID NO: 3906 - protein, 296 aa, Saccharophagus degradans 2-40; identical to SEQ ID NO: 565

SEQ ID NO: 3907 - DNA, 888 bp, Methylobacillus flagellatus KT; identical to SEQ ID NO: 568
  CDS (1)..(888): transl_table=11

SEQ ID NO: 3908 - protein, 295 aa, Methylobacillus flagellatus KT; identical to SEQ ID NO: 569

SEQ ID NO: 3909 - DNA, 948 bp, Burkholderia xenovorans LB400; identical to SEQ ID NO: 570
  CDS (1)..(948): transl_table=11

SEQ ID NO: 3910 - protein, 315 aa, Burkholderia xenovorans LB400; identical to SEQ ID NO: 571

SEQ ID NO: 3911 - DNA, 903 bp, Burkholderia xenovorans LB400; identical to SEQ ID NO: 572
  CDS (1)..(903): transl_table=11

SEQ ID NO: 3912 - protein, 300 aa, Burkholderia xenovorans LB400; identical to SEQ ID NO: 573

SEQ ID NO: 3913 - DNA, 930 bp, Methanococcoides burtonii DSM 6242; identical to SEQ ID NO: 574
  CDS (1)..(930): transl_table=11

SEQ ID NO: 3914 - protein, 309 aa, Methanococcoides burtonii DSM 6242; identical to SEQ ID NO: 575

SEQ ID NO: 3915 - DNA, 936 bp, Ralstonia metallidurans CH34; identical to SEQ ID NO: 576
  CDS (1)..(936): transl_table=11

SEQ ID NO: 3916 - protein, 311 aa, Ralstonia metallidurans CH34; identical to SEQ ID NO: 577

SEQ ID NO: 3917 - DNA, 972 bp, Acidobacteria bacterium Ellin345; identical to SEQ ID NO: 578
  CDS (1)..(972): transl_table=11

SEQ ID NO: 3918 - protein, 323 aa, Acidobacteria bacterium Ellin345; identical to SEQ ID NO: 579

SEQ ID NO: 3919 - DNA, 948 bp, Acidobacteria bacterium Ellin345; identical to SEQ ID NO: 580
  CDS (1)..(948): transl_table=11

SEQ ID NO: 3920 - protein, 315 aa, Acidobacteria bacterium Ellin345; identical to SEQ ID NO: 581

SEQ ID NO: 3921 - DNA, 1185 bp, Silicibacter sp. TM1040; identical to SEQ ID NO: 582
  CDS (1)..(1185): transl_table=11

SEQ ID NO: 3922 - protein, 394 aa, Silicibacter sp. TM1040; identical to SEQ ID NO: 583

SEQ ID NO: 3923 - DNA, 921 bp, Myxococcus xanthus DK 1622; identical to SEQ ID NO: 584
  CDS (1)..(921): transl_table=11

SEQ ID NO: 3924 - protein, 306 aa, Myxococcus xanthus DK 1622; identical to SEQ ID NO: 585

SEQ ID NO: 3925 - DNA, 993 bp, Myxococcus xanthus DK 1622; identical to SEQ ID NO: 586
  CDS (1)..(993): transl_table=11

SEQ ID NO: 3926 - protein, 330 aa, Myxococcus xanthus DK 1622; identical to SEQ ID NO: 587

SEQ ID NO: 3927 - DNA, 972 bp, Mycobacterium sp. MCS; identical to SEQ ID NO: 588
  CDS (1)..(972): transl_table=11

SEQ ID NO: 3928 - protein, 323 aa, Mycobacterium sp. MCS; identical to SEQ ID NO: 589

SEQ ID NO: 3929 - DNA, 984 bp, Rubrobacter xylanophilus DSM 9941; identical to SEQ ID NO: 590
  CDS (1)..(984): transl_table=11

SEQ ID NO: 3930 - protein, 327 aa, Rubrobacter xylanophilus DSM 9941; identical to SEQ ID NO: 591

SEQ ID NO: 3931 - DNA, 918 bp, Rubrobacter xylanophilus DSM 9941; identical to SEQ ID NO: 592
  CDS (1)..(918): transl_table=11

SEQ ID NO: 3932 - protein, 305 aa, Rubrobacter xylanophilus DSM 9941; identical to SEQ ID NO: 593

SEQ ID NO: 3933 - DNA, 972 bp, Rubrobacter xylanophilus DSM 9941; identical to SEQ ID NO: 594
  CDS (1)..(972): transl_table=11

SEQ ID NO: 3934 - protein, 323 aa, Rubrobacter xylanophilus DSM 9941; identical to SEQ ID NO: 595

SEQ ID NO: 3935 - DNA, 1041 bp, Mesorhizobium sp. BNC1; identical to SEQ ID NO: 596
  CDS (1)..(1041): transl_table=11

SEQ ID NO: 3936 - protein, 346 aa, Mesorhizobium sp. BNC1; identical to SEQ ID NO: 597

SEQ ID NO: 3937 - DNA, 885 bp, Cytophaga hutchinsonii ATCC 33406; identical to SEQ ID NO: 598
  CDS (1)..(885): transl_table=11

SEQ ID NO: 3938 - protein, 294 aa, Cytophaga hutchinsonii ATCC 33406; identical to SEQ ID NO: 599

SEQ ID NO: 3939 - DNA, 963 bp, Rhodococcus sp. RHA1; identical to SEQ ID NO: 600
  CDS (1)..(963): transl_table=11

SEQ ID NO: 3940 - protein, 320 aa, Rhodococcus sp. RHA1; identical to SEQ ID NO: 601

SEQ ID NO: 3941 - DNA, 951 bp, Haemophilus somnus 129PT; identical to SEQ ID NO: 602
  CDS (1)..(951): transl_table=11

SEQ ID NO: 3942 - protein, 316 aa, Haemophilus somnus 129PT; identical to SEQ ID NO: 603

SEQ ID NO: 3943 - DNA, 981 bp, Trichodesmium erythraeum IMS101; identical to SEQ ID NO: 606
  CDS (1)..(981): transl_table=11

SEQ ID NO: 3944 - protein, 326 aa, Trichodesmium erythraeum IMS101; identical to SEQ ID NO: 607

SEQ ID NO: 3945 - DNA, 1032 bp, Synechococcus sp. CC9311; identical to SEQ ID NO: 608
  CDS (1)..(1032): transl_table=11

SEQ ID NO: 3946 - protein, 343 aa, Synechococcus sp. CC9311; identical to SEQ ID NO: 609

SEQ ID NO: 3947 - DNA, 969 bp, Synechococcus sp. CC9311; identical to SEQ ID NO: 610
  CDS (1)..(969): transl_table=11

SEQ ID NO: 3948 - protein, 322 aa, Synechococcus sp. CC9311; identical to SEQ ID NO: 611

SEQ ID NO: 3949 - DNA, 879 bp, Shewanella sp. MR-4; identical to SEQ ID NO: 612
  CDS (1)..(879): transl_table=11

SEQ ID NO: 3950 - protein, 292 aa, Shewanella sp. MR-4; identical to SEQ ID NO: 613

SEQ ID NO: 3951 - DNA, 894 bp, Alkalilimnicola ehrlichei MLHE-1; identical to SEQ ID NO: 614
  CDS (1)..(894): transl_table=11

SEQ ID NO: 3952 - protein, 297 aa, Alkalilimnicola ehrlichei MLHE-1; identical to SEQ ID NO: 615

SEQ ID NO: 3953 - DNA, 1017 bp, Alkalilimnicola ehrlichei MLHE-1; identical to SEQ ID NO: 616
  CDS (1)..(1017): transl_table=11

SEQ ID NO: 3954 - protein, 338 aa, Alkalilimnicola ehrlichei MLHE-1; identical to SEQ ID NO: 617

SEQ ID NO: 3955 - DNA, 984 bp, Hyphomonas neptunium ATCC 15444; identical to SEQ ID NO: 618
  CDS (1)..(984): transl_table=11

SEQ ID NO: 3956 - protein, 327 aa, Hyphomonas neptunium ATCC 15444; identical to SEQ ID NO: 619

SEQ ID NO: 3957 - DNA, 1074 bp, Hyphomonas neptunium ATCC 15444; identical to SEQ ID NO: 620
  CDS (1)..(1074): transl_table=11

SEQ ID NO: 3958 - protein, 357 aa, Hyphomonas neptunium ATCC 15444; identical to SEQ ID NO: 621

SEQ ID NO: 3959 - DNA, 963 bp, Rhizobium leguminosarum bv. viciae 3841; identical to SEQ ID NO: 622
  CDS (1)..(963): transl_table=11

SEQ ID NO: 3960 - protein, 320 aa, Rhizobium leguminosarum bv. viciae 3841; identical to SEQ ID NO: 623

SEQ ID NO: 3961 - DNA, 975 bp, Pseudomonas aeruginosa UCBPP-PA14; identical to SEQ ID NO: 624
  CDS (1)..(975): transl_table=11

SEQ ID NO: 3962 - protein, 324 aa, Pseudomonas aeruginosa UCBPP-PA14; identical to SEQ ID NO: 625

SEQ ID NO: 3963 - DNA, 912 bp, Oenococcus oeni PSU-1; identical to SEQ ID NO: 626
  CDS (1)..(912): transl_table=11

SEQ ID NO: 3964 - protein, 303 aa, Oenococcus oeni PSU-1; identical to SEQ ID NO: 627

SEQ ID NO: 3965 - DNA, 915 bp, Leuconostoc mesenteroides subsp. mesenteroides ATCC 8293; identical to SEQ ID NO: 628
  CDS (1)..(915): transl_table=11

SEQ ID NO: 3966 - protein, 304 aa, Leuconostoc mesenteroides subsp. mesenteroides ATCC 8293; identical to SEQ ID NO: 629

SEQ ID NO: 3967 - DNA, 954 bp, Solibacter usitatus Ellin6076; identical to SEQ ID NO: 630
  CDS (1)..(954): transl_table=11

SEQ ID NO: 3968 - protein, 317 aa, Solibacter usitatus Ellin6076; identical to SEQ ID NO: 631

SEQ ID NO: 3969 - DNA, 1071 bp, Solibacter usitatus Ellin6076; identical to SEQ ID NO: 632
  CDS (1)..(1071): transl_table=11

SEQ ID NO: 3970 - protein, 356 aa, Solibacter usitatus Ellin6076; identical to SEQ ID NO: 633

SEQ ID NO: 3971 - DNA, 960 bp, Solibacter usitatus Ellin6076; identical to SEQ ID NO: 634
  CDS (1)..(960): transl_table=11

SEQ ID NO: 3972 - protein, 319 aa, Solibacter usitatus Ellin6076; identical to SEQ ID NO: 635

SEQ ID NO: 3973 - DNA, 891 bp, Magnetococcus sp. MC-1; identical to SEQ ID NO: 636
  CDS (1)..(891): transl_table=11

SEQ ID NO: 3974 - protein, 296 aa, Magnetococcus sp. MC-1; identical to SEQ ID NO: 637

SEQ ID NO: 3975 - DNA, 936 bp, Magnetococcus sp. MC-1; identical to SEQ ID NO: 638
  CDS (1)..(936): transl_table=11

SEQ ID NO: 3976 - protein, 311 aa, Magnetococcus sp. MC-1; identical to SEQ ID NO: 639

SEQ ID NO: 3977 - DNA, 969 bp, Shewanella sp. ANA-3; identical to SEQ ID NO: 640
  CDS (1)..(969): transl_table=11

SEQ ID NO: 3978 - protein, 322 aa, Shewanella sp. ANA-3; identical to SEQ ID NO: 641

SEQ ID NO: 3979 - DNA, 879 bp, Shewanella sp. ANA-3; identical to SEQ ID NO: 642
  CDS (1)..(879): transl_table=11

SEQ ID NO: 3980 - protein, 292 aa, Shewanella sp. ANA-3; identical to SEQ ID NO: 643

SEQ ID NO: 3981 - DNA, 933 bp, Mycobacterium avium 104; identical to SEQ ID NO: 644
  CDS (1)..(933): transl_table=11

SEQ ID NO: 3982 - protein, 310 aa, Mycobacterium avium 104; identical to SEQ ID NO: 645

SEQ ID NO: 3983 - DNA, 972 bp, Mycobacterium smegmatis str. MC2 155; identical to SEQ ID NO: 646
  CDS (1)..(972): transl_table=11

SEQ ID NO: 3984 - protein, 323 aa, Mycobacterium smegmatis str. MC2 155; identical to SEQ ID NO: 647

SEQ ID NO: 3985 - DNA, 963 bp, Nocardioides sp. JS614; identical to SEQ ID NO: 648
  CDS (1)..(963): transl_table=11

SEQ ID NO: 3986 - protein, 320 aa, Nocardioides sp. JS614; identical to SEQ ID NO: 649

SEQ ID NO: 3987 - DNA, 930 bp, Nocardioides sp. JS614; identical to SEQ ID NO: 650
  CDS (1)..(930): transl_table=11

SEQ ID NO: 3988 - protein, 309 aa, Nocardioides sp. JS614; identical to SEQ ID NO: 651

SEQ ID NO: 3989 - DNA, 891 bp, Azoarcus sp. BH72; identical to SEQ ID NO: 652
  CDS (1)..(891): transl_table=11

SEQ ID NO: 3990 - protein, 296 aa, Azoarcus sp. BH72; identical to SEQ ID NO: 653

SEQ ID NO: 3991 - DNA, 981 bp, Azoarcus sp. BH72; identical to SEQ ID NO: 654
  CDS (1)..(981): transl_table=11

SEQ ID NO: 3992 - protein, 326 aa, Azoarcus sp. BH72; identical to SEQ ID NO: 655

SEQ ID NO: 3993 - DNA, 918 bp, Acidovorax sp. JS42; identical to SEQ ID NO: 658
  CDS (1)..(918): transl_table=11

SEQ ID NO: 3994 - protein, 305 aa, Acidovorax sp. JS42; identical to SEQ ID NO: 659

SEQ ID NO: 3995 - DNA, 1047 bp, Magnetospirillum magnetotacticum MS-1; identical to SEQ ID NO: 660
  CDS (1)..(1047): transl_table=11

SEQ ID NO: 3996 - protein, 348 aa, Magnetospirillum magnetotacticum MS-1; identical to SEQ ID NO: 661

SEQ ID NO: 3997 - DNA, 975 bp, Nostoc punctiforme PCC 73102; identical to SEQ ID NO: 662
  CDS (1)..(975): transl_table=11

SEQ ID NO: 3998 - protein, 324 aa, Nostoc punctiforme PCC 73102; identical to SEQ ID NO: 663

SEQ ID NO: 3999 - DNA, 963 bp, Nostoc punctiforme PCC 73102; identical to SEQ ID NO: 664
  CDS (1)..(963): transl_table=11

SEQ ID NO: 4000 - protein, 320 aa, Nostoc punctiforme PCC 73102; identical to SEQ ID NO: 665

SEQ ID NO: 4001 - DNA, 963 bp, Nostoc punctiforme PCC 73102; identical to SEQ ID NO: 666
  CDS (1)..(963): transl_table=11

SEQ ID NO: 4002 - protein, 320 aa, Nostoc punctiforme PCC 73102; identical to SEQ ID NO: 667

SEQ ID NO: 4003 - DNA, 960 bp, Nostoc punctiforme PCC 73102; identical to SEQ ID NO: 668
  CDS (1)..(960): transl_table=11

SEQ ID NO: 4004 - protein, 319 aa, Nostoc punctiforme PCC 73102; identical to SEQ ID NO: 669

SEQ ID NO: 4005 - DNA, 1227 bp, Bifidobacterium longum DJO10A; identical to SEQ ID NO: 670
  CDS (160)..(1227): transl_table=11

SEQ ID NO: 4006 - protein, 355 aa, Bifidobacterium longum DJO10A; identical to SEQ ID NO: 671

SEQ ID NO: 4007 - DNA, 924 bp, Bacillus cereus G9241; identical to SEQ ID NO: 672
  CDS (1)..(924): transl_table=11

SEQ ID NO: 4008 - protein, 307 aa, Bacillus cereus G9241; identical to SEQ ID NO: 673

SEQ ID NO: 4009 - DNA, 924 bp, Bacillus cereus G9241; identical to SEQ ID NO: 674
  CDS (1)..(924): transl_table=11

SEQ ID NO: 4010 - protein, 307 aa, Bacillus cereus G9241; identical to SEQ ID NO: 675

SEQ ID NO: 4011 - DNA, 963 bp, Crocosphaera watsonii WH 8501; identical to SEQ ID NO: 678
  CDS (1)..(963): transl_table=11

SEQ ID NO: 4012 - protein, 320 aa, Crocosphaera watsonii WH 8501; identical to SEQ ID NO: 679

SEQ ID NO: 4013 - DNA, 954 bp, Exiguobacterium sibiricum 255-15; identical to SEQ ID NO: 680
  CDS (1)..(954): transl_table=11

SEQ ID NO: 4014 - protein, 317 aa, Exiguobacterium sibiricum 255-15; identical to SEQ ID NO: 681

SEQ ID NO: 4015 - DNA, 927 bp, Prosthecochloris aestuarii DSM 271; identical to SEQ ID NO: 682
  CDS (1)..(927): transl_table=11

SEQ ID NO: 4016 - protein, 308 aa, Prosthecochloris aestuarii DSM 271; identical to SEQ ID NO: 683

SEQ ID NO: 4017 - DNA, 978 bp, Croceibacter atlanticus HTCC2559; identical to SEQ ID NO: 684
  CDS (1)..(978): transl_table=11

SEQ ID NO: 4018 - protein, 325 aa, Croceibacter atlanticus HTCC2559; identical to SEQ ID NO: 685

SEQ ID NO: 4019 - DNA, 1035 bp, Sulfitobacter sp. EE-36; identical to SEQ ID NO: 686
  CDS (1)..(1035): transl_table=11

SEQ ID NO: 4020 - protein, 344 aa, Sulfitobacter sp. EE-36; identical to SEQ ID NO: 687

SEQ ID NO: 4021 - DNA, 1053 bp, Sulfitobacter sp. EE-36; identical to SEQ ID NO: 688
  CDS (1)..(1053): transl_table=11

SEQ ID NO: 4022 - protein, 350 aa, Sulfitobacter sp. EE-36; identical to SEQ ID NO: 689

SEQ ID NO: 4023 - DNA, 966 bp, Roseovarius nubinhibens ISM; identical to SEQ ID NO: 690
  CDS (1)..(966): transl_table=11

SEQ ID NO: 4024 - protein, 321 aa, Roseovarius nubinhibens ISM; identical to SEQ ID NO: 691

SEQ ID NO: 4025 - DNA, 1032 bp, Roseovarius nubinhibens ISM; identical to SEQ ID NO: 692
  CDS (1)..(1032): transl_table=11

SEQ ID NO: 4026 - protein, 343 aa, Roseovarius nubinhibens ISM; identical to SEQ ID NO: 693

SEQ ID NO: 4027 - DNA, 1032 bp, Oceanicola batsensis HTCC2597; identical to SEQ ID NO: 694
  CDS (1)..(1032): transl_table=11

SEQ ID NO: 4028 - protein, 343 aa, Oceanicola batsensis HTCC2597; identical to SEQ ID NO: 695

SEQ ID NO: 4029 - DNA, 1023 bp, Erythrobacter sp. NAP1; identical to SEQ ID NO: 696
  CDS (1)..(1023): transl_table=11

SEQ ID NO: 4030 - protein, 340 aa, Erythrobacter sp. NAP1; identical to SEQ ID NO: 697

SEQ ID NO: 4031 - DNA, 921 bp, Erythrobacter sp. NAP1; identical to SEQ ID NO: 698
  CDS (1)..(921): transl_table=11

SEQ ID NO: 4032 - protein, 306 aa, Erythrobacter sp. NAP1; identical to SEQ ID NO: 699

SEQ ID NO: 4033 - DNA, 969 bp, Synechococcus sp. RS9917; identical to SEQ ID NO: 700
  CDS (1)..(969): transl_table=11

SEQ ID NO: 4034 - protein, 322 aa, Synechococcus sp. RS9917; identical to SEQ ID NO: 701

SEQ ID NO: 4035 - DNA, 987 bp, Synechococcus sp. RS9917; identical to SEQ ID NO: 702
  CDS (1)..(987): transl_table=11

SEQ ID NO: 4036 - protein, 328 aa, Synechococcus sp. RS9917; identical to SEQ ID NO: 703

SEQ ID NO: 4037 - DNA, 1026 bp, Synechococcus sp. WH 5701; identical to SEQ ID NO: 704
  CDS (1)..(1026): transl_table=11

SEQ ID NO: 4038 - protein, 341 aa, Synechococcus sp. WH 5701; identical to SEQ ID NO: 705

SEQ ID NO: 4039 - DNA, 987 bp, Synechococcus sp. WH 5701; identical to SEQ ID NO: 706
  CDS (1)..(987): transl_table=11

SEQ ID NO: 4040 - protein, 328 aa, Synechococcus sp. WH 5701; identical to SEQ ID NO: 707

SEQ ID NO: 4041 - DNA, 951 bp, Synechococcus sp. WH 7805; identical to SEQ ID NO: 708
  CDS (1)..(951): transl_table=11

SEQ ID NO: 4042 - protein, 316 aa, Synechococcus sp. WH 7805; identical to SEQ ID NO: 709

SEQ ID NO: 4043 - DNA, 987 bp, Synechococcus sp. WH 7805; identical to SEQ ID NO: 710
  CDS (1)..(987): transl_table=11

SEQ ID NO: 4044 - protein, 328 aa, Synechococcus sp. WH 7805; identical to SEQ ID NO: 711

SEQ ID NO: 4045 - DNA, 969 bp, Pseudoalteromonas tunicata D2; identical to SEQ ID NO: 712
  CDS (1)..(969): transl_table=11

SEQ ID NO: 4046 - protein, 322 aa, Pseudoalteromonas tunicata D2; identical to SEQ ID NO: 713

SEQ ID NO: 4047 - DNA, 969 bp, Neptuniibacter caesariensis; identical to SEQ ID NO: 714
  CDS (1)..(969): transl_table=11

SEQ ID NO: 4048 - protein, 322 aa, Neptuniibacter caesariensis; identical to SEQ ID NO: 715

SEQ ID NO: 4049 - DNA, 900 bp, Neptuniibacter caesariensis; identical to SEQ ID NO: 716
  CDS (1)..(900): transl_table=11

SEQ ID NO: 4050 - protein, 299 aa, Neptuniibacter caesariensis; identical to SEQ ID NO: 717

SEQ ID NO: 4051 - DNA, 1017 bp, Flavobacteria bacterium BBFL7; identical to SEQ ID NO: 718
  CDS (1)..(1017): transl_table=11

SEQ ID NO: 4052 - protein, 338 aa, Flavobacteria bacterium BBFL7; identical to SEQ ID NO: 719

SEQ ID NO: 4053 - DNA, 1041 bp, Flavobacteria bacterium BBFL7; identical to SEQ ID NO: 720
  CDS (1)..(1041): transl_table=11

SEQ ID NO: 4054 - protein, 346 aa, Flavobacteria bacterium BBFL7; identical to SEQ ID NO: 721

SEQ ID NO: 4055 - DNA, 939 bp, delta proteobacterium MLMS-1; identical to SEQ ID NO: 722
  CDS (1)..(939): transl_table=11

SEQ ID NO: 4056 - protein, 312 aa, delta proteobacterium MLMS-1; identical to SEQ ID NO: 723

SEQ ID NO: 4057 - DNA, 894 bp, Oceanobacter sp. RED65; identical to SEQ ID NO: 724
  CDS (1)..(894): transl_table=11

SEQ ID NO: 4058 - protein, 297 aa, Oceanobacter sp. RED65; identical to SEQ ID NO: 725

SEQ ID NO: 4059 - DNA, 936 bp, Desulfitobacterium hafniense DCB-2; identical to SEQ ID NO: 726
  CDS (1)..(936): transl_table=11

SEQ ID NO: 4060 - protein, 311 aa, Desulfitobacterium hafniense DCB-2; identical to SEQ ID NO: 727

SEQ ID NO: 4061 - DNA, 969 bp, Synechococcus sp. RS9916; identical to SEQ ID NO: 728
  CDS (1)..(969): transl_table=11

SEQ ID NO: 4062 - protein, 322 aa, Synechococcus sp. RS9916; identical to SEQ ID NO: 729

SEQ ID NO: 4063 - DNA, 987 bp, Synechococcus sp. RS9916; identical to SEQ ID NO: 730
  CDS (1)..(987): transl_table=11

SEQ ID NO: 4064 - protein, 328 aa, Synechococcus sp. RS9916; identical to SEQ ID NO: 731

SEQ ID NO: 4065 - DNA, 969 bp, Alteromonadales bacterium TW-7; identical to SEQ ID NO: 732
  CDS (1)..(969): transl_table=11

SEQ ID NO: 4066 - protein, 322 aa, Alteromonadales bacterium TW-7; identical to SEQ ID NO: 733

SEQ ID NO: 4067 - DNA, 966 bp, marine gamma proteobacterium HTCC2143; identical to SEQ ID NO: 734
  CDS (1)..(966): transl_table=11

SEQ ID NO: 4068 - protein, 321 aa, marine gamma proteobacterium HTCC2143; identical to SEQ ID NO: 735

SEQ ID NO: 4069 - DNA, 1008 bp, marine gamma proteobacterium HTCC2143; identical to SEQ ID NO: 736
  CDS (1)..(1008): transl_table=11

SEQ ID NO: 4070 - protein, 335 aa, marine gamma proteobacterium HTCC2143; identical to SEQ ID NO: 737

SEQ ID NO: 4071 - DNA, 906 bp, marine gamma proteobacterium HTCC2143; identical to SEQ ID NO: 738
  CDS (1)..(906): transl_table=11

SEQ ID NO: 4072 - protein, 301 aa, marine gamma proteobacterium HTCC2143; identical to SEQ ID NO: 739

SEQ ID NO: 4073 - DNA, 1053 bp, marine gamma proteobacterium HTCC2080; identical to SEQ ID NO: 742
  CDS (1)..(1053): transl_table=11

SEQ ID NO: 4074 - protein, 350 aa, marine gamma proteobacterium HTCC2080; identical to SEQ ID NO: 743

SEQ ID NO: 4075 - DNA, 894 bp, Marinobacter sp. ELB17; identical to SEQ ID NO: 744
  CDS (1)..(894): transl_table=11

SEQ ID NO: 4076 - protein, 297 aa, Marinobacter sp. ELB17; identical to SEQ ID NO: 745

SEQ ID NO: 4077 - DNA, 855 bp, Bacillus sp. SG-1; identical to SEQ ID NO: 746
  CDS (1)..(855): transl_table=11

SEQ ID NO: 4078 - protein, 284 aa, Bacillus sp. SG-1; identical to SEQ ID NO: 747

SEQ ID NO: 4079 - DNA, 930 bp, Bacillus sp. SG-1; identical to SEQ ID NO: 748
  CDS (1)..(930): transl_table=11

SEQ ID NO: 4080 - protein, 309 aa, Bacillus sp. SG-1; identical to SEQ ID NO: 749

SEQ ID NO: 4081 - DNA, 921 bp, Erythrobacter sp. SD-21; identical to SEQ ID NO: 750
  CDS (1)..(921): transl_table=11

SEQ ID NO: 4082 - protein, 306 aa, Erythrobacter sp. SD-21; identical to SEQ ID NO: 751

SEQ ID NO: 4083 - DNA, 1017 bp, Erythrobacter sp. SD-21; identical to SEQ ID NO: 752
  CDS (1)..(1017): transl_table=11

SEQ ID NO: 4084 - protein, 338 aa, Erythrobacter sp. SD-21; identical to SEQ ID NO: 753

SEQ ID NO: 4085 - DNA, 894 bp, Moritella sp. PE36; identical to SEQ ID NO: 754
  CDS (1)..(894): transl_table=11

SEQ ID NO: 4086 - protein, 297 aa, Moritella sp. PE36; identical to SEQ ID NO: 755

SEQ ID NO: 4087 - DNA, 969 bp, Moritella sp. PE36; identical to SEQ ID NO: 756
  CDS (1)..(969): transl_table=11

SEQ ID NO: 4088 - protein, 322 aa, Moritella sp. PE36; identical to SEQ ID NO: 757

SEQ ID NO: 4089 - DNA, 951 bp, Opitutaceae bacterium TAV2; identical to SEQ ID NO: 758
  CDS (1)..(951): transl_table=11

SEQ ID NO: 4090 - protein, 316 aa, Opitutaceae bacterium TAV2; identical to SEQ ID NO: 759

SEQ ID NO: 4091 - DNA, 978 bp, Opitutaceae bacterium TAV2; identical to SEQ ID NO: 760
  CDS (1)..(978): transl_table=11

SEQ ID NO: 4092 - protein, 325 aa, Opitutaceae bacterium TAV2; identical to SEQ ID NO: 761

SEQ ID NO: 4093 - DNA, 978 bp, Opitutaceae bacterium TAV2; identical to SEQ ID NO: 762
  CDS (1)..(978): transl_table=11

SEQ ID NO: 4094 - protein, 325 aa, Opitutaceae bacterium TAV2; identical to SEQ ID NO: 763

SEQ ID NO: 4095 - DNA, 876 bp, Thermotoga sp. RQ2; identical to SEQ ID NO: 764
  CDS (1)..(876): transl_table=11

SEQ ID NO: 4096 - protein, 291 aa, Thermotoga sp. RQ2; identical to SEQ ID NO: 765

SEQ ID NO: 4097 - DNA, 993 bp, Gemmata obscuriglobus UQM 2246; identical to SEQ ID NO: 766
  CDS (1)..(993): transl_table=11

SEQ ID NO: 4098 - protein, 330 aa, Gemmata obscuriglobus UQM 2246; identical to SEQ ID NO: 767

SEQ ID NO: 4099 - DNA, 978 bp, Thauera sp. MZ1T; identical to SEQ ID NO: 770
  CDS (1)..(978): transl_table=11

SEQ ID NO: 4100 - protein, 325 aa, Thauera sp. MZ1T; identical to SEQ ID NO: 771

SEQ ID NO: 4101 - DNA, 918 bp, Sporosarcina halophila; identical to SEQ ID NO: 772
  CDS (1)..(918): transl_table=11

SEQ ID NO: 4102 - protein, 305 aa, Sporosarcina halophila; identical to SEQ ID NO: 773

SEQ ID NO: 4103 - DNA, 1200 bp, Oryza sativa subsp; identical to SEQ ID NO: 774
  CDS (1)..(1200)

SEQ ID NO: 4104 - protein, 399 aa, Oryza sativa subsp; identical to SEQ ID NO: 775

SEQ ID NO: 4105 - DNA, 1161 bp, Oryza sativa subsp; identical to SEQ ID NO: 776
  CDS (1)..(1161)

SEQ ID NO: 4106 - protein, 386 aa, Oryza sativa subsp; identical to SEQ ID NO: 777

SEQ ID NO: 4107 - DNA, 1374 bp, Oryza sativa subsp; identical to SEQ ID NO: 778
  CDS (1)..(1374)

SEQ ID NO: 4108 - protein, 457 aa, Oryza sativa subsp; identical to SEQ ID NO: 779

SEQ ID NO: 4109 - DNA, 993 bp, Oryza sativa subsp; identical to SEQ ID NO: 780
  CDS (1)..(993)

SEQ ID NO: 4110 - protein, 330 aa, Oryza sativa subsp; identical to SEQ ID NO: 781

SEQ ID NO: 4111 - DNA, 978 bp, Glycine max; identical to SEQ ID NO: 782
  CDS (1)..(978)

SEQ ID NO: 4112 - protein, 325 aa, Glycine max; identical to SEQ ID NO: 783

SEQ ID NO: 4113 - DNA, 972 bp, Glycine max; identical to SEQ ID NO: 784
  CDS (1)..(972)

SEQ ID NO: 4114 - protein, 323 aa, Glycine max; identical to SEQ ID NO: 785

SEQ ID NO: 4115 - DNA, 975 bp, Glycine max; identical to SEQ ID NO: 786
  CDS (1)..(975)

SEQ ID NO: 4116 - protein, 324 aa, Glycine max; identical to SEQ ID NO: 787

SEQ ID NO: 4117 - DNA, 942 bp, Magnetospirillum gryphiswaldense; identical to SEQ ID NO: 788
  CDS (1)..(942): transl_table=11

SEQ ID NO: 4118 - protein, 313 aa, Magnetospirillum gryphiswaldense; identical to SEQ ID NO: 789

SEQ ID NO: 4119 - DNA, 1005 bp, Magnetospirillum gryphiswaldense; identical to SEQ ID NO: 790
  CDS (1)..(1005): transl_table=11

SEQ ID NO: 4120 - protein, 334 aa, Magnetospirillum gryphiswaldense; identical to SEQ ID NO: 791

SEQ ID NO: 4121 - DNA, 978 bp, Vitis vinifera; identical to SEQ ID NO: 792
  CDS (1)..(978)

SEQ ID NO: 4122 - protein, 325 aa, Vitis vinifera; identical to SEQ ID NO: 793

SEQ ID NO: 4123 - DNA, 972 bp, Vitis vinifera; identical to SEQ ID NO: 794
  CDS (1)..(972)

SEQ ID NO: 4124 - protein, 323 aa, Vitis vinifera; identical to SEQ ID NO: 795

SEQ ID NO: 4125 - DNA, 978 bp, Glycine soja; identical to SEQ ID NO: 796
  CDS (1)..(978)

SEQ ID NO: 4126 - protein, 325 aa, Glycine soja; identical to SEQ ID NO: 797

SEQ ID NO: 4127 - DNA, 1170 bp, Glycine max; identical to SEQ ID NO: 798
  CDS (1)..(1170)

SEQ ID NO: 4128 - protein, 389 aa, Glycine max; identical to SEQ ID NO: 799

SEQ ID NO: 4129 - DNA, 1116 bp, Vitis vinifera; identical to SEQ ID NO: 800
  CDS (1)..(1116)

SEQ ID NO: 4130 - protein, 371 aa, Vitis vinifera; identical to SEQ ID NO: 801

SEQ ID NO: 4131 - DNA, 972 bp, Vitis vinifera; identical to SEQ ID NO: 802
  CDS (1)..(972)

SEQ ID NO: 4132 - protein, 323 aa, Vitis vinifera; identical to SEQ ID NO: 803

SEQ ID NO: 4133 - DNA, 972 bp, Vitis vinifera; identical to SEQ ID NO: 804
  CDS (1)..(972)

SEQ ID NO: 4134 - protein, 323 aa, Vitis vinifera; identical to SEQ ID NO: 805

SEQ ID NO: 4135 - DNA, 972 bp, Vitis vinifera; identical to SEQ ID NO: 806
  CDS (1)..(972)

SEQ ID NO: 4136 - protein, 323 aa, Vitis vinifera; identical to SEQ ID NO: 807

SEQ ID NO: 4137 - DNA, 972 bp, Vitis vinifera; identical to SEQ ID NO: 808
  CDS (1)..(972)

SEQ ID NO: 4138 - protein, 323 aa, Vitis vinifera; identical to SEQ ID NO: 809

SEQ ID NO: 4139 - DNA, 933 bp, Vitis vinifera; identical to SEQ ID NO: 810
  CDS (1)..(933)

SEQ ID NO: 4140 - protein, 310 aa, Vitis vinifera; identical to SEQ ID NO: 811

SEQ ID NO: 4141 - DNA, 1173 bp, Vitis vinifera; identical to SEQ ID NO: 812
  CDS (1)..(1173)

SEQ ID NO: 4142 - protein, 390 aa, Vitis vinifera; identical to SEQ ID NO: 813

SEQ ID NO: 4143 - DNA, 918 bp, Vitis vinifera; identical to SEQ ID NO: 814
  CDS (1)..(918)

SEQ ID NO: 4144 - protein, 305 aa, Vitis vinifera; identical to SEQ ID NO: 815

SEQ ID NO: 4145 - DNA, 948 bp, Microcystis aeruginosa PCC 7806; identical to SEQ ID NO: 816
  CDS (1)..(948): transl_table=11

SEQ ID NO: 4146 - protein, 315 aa, Microcystis aeruginosa PCC 7806; identical to SEQ ID NO: 817

SEQ ID NO: 4147 - DNA, 960 bp, Microcystis aeruginosa PCC 7806; identical to SEQ ID NO: 818
  CDS (1)..(960): transl_table=11

SEQ ID NO: 4148 - protein, 319 aa, Microcystis aeruginosa PCC 7806; identical to SEQ ID NO: 819

SEQ ID NO: 4149 - DNA, 969 bp, Microcystis aeruginosa PCC 7806; identical to SEQ ID NO: 820
  CDS (1)..(969): transl_table=11

SEQ ID NO: 4150 - protein, 322 aa, Microcystis aeruginosa PCC 7806; identical to SEQ ID NO: 821

SEQ ID NO: 4151 - DNA, 924 bp, Picea sitchensis; identical to SEQ ID NO: 822
  CDS (1)..(924)

SEQ ID NO: 4152 - protein, 307 aa, Picea sitchensis; identical to SEQ ID NO: 823

SEQ ID NO: 4153 - DNA, 1206 bp, Picea sitchensis; identical to SEQ ID NO: 824
  CDS (1)..(1206)

SEQ ID NO: 4154 - protein, 401 aa, Picea sitchensis; identical to SEQ ID NO: 825

SEQ ID NO: 4155 - DNA, 978 bp, Populus trichocarpa; identical to SEQ ID NO: 826
  CDS (1)..(978)

SEQ ID NO: 4156 - protein, 325 aa, Populus trichocarpa; identical to SEQ ID NO: 827

SEQ ID NO: 4157 - DNA, 1125 bp, Populus trichocarpa; identical to SEQ ID NO: 828
  CDS (1)..(1125)

SEQ ID NO: 4158 - protein, 374 aa, Populus trichocarpa; identical to SEQ ID NO: 829

SEQ ID NO: 4159 - DNA, 1209 bp, Populus jackii; identical to SEQ ID NO: 830
  CDS (1)..(1209)

SEQ ID NO: 4160 - protein, 402 aa, Populus jackii; identical to SEQ ID NO: 831

SEQ ID NO: 4161 - DNA, 978 bp, Sesamum indicum; identical to SEQ ID NO: 832
  CDS (1)..(978)

SEQ ID NO: 4162 - protein, 325 aa, Sesamum indicum; identical to SEQ ID NO: 833

SEQ ID NO: 4163 - DNA, 1134 bp, Manihot esculenta; identical to SEQ ID NO: 834
  CDS (1)..(1134)

SEQ ID NO: 4164 - protein, 377 aa, Manihot esculenta; identical to SEQ ID NO: 835

SEQ ID NO: 4165 - DNA, 1035 bp, Rhodobacter sphaeroides; identical to SEQ ID NO: 836
  CDS (1)..(1035): transl_table=11

SEQ ID NO: 4166 - protein, 344 aa, Rhodobacter sphaeroides; identical to SEQ ID NO: 837

SEQ ID NO: 4167 - DNA, 1038 bp, Ostreococcus tauri; identical to SEQ ID NO: 838
  CDS (1)..(1038)

SEQ ID NO: 4168 - protein, 345 aa, Ostreococcus tauri; identical to SEQ ID NO: 839

SEQ ID NO: 4169 - DNA, 1323 bp, Ostreococcus tauri; identical to SEQ ID NO: 840
  CDS (1)..(1323)

SEQ ID NO: 4170 - protein, 440 aa, Ostreococcus tauri; identical to SEQ ID NO: 841

SEQ ID NO: 4171 - DNA, 1464 bp, Arabidopsis thaliana; identical to SEQ ID NO: 842
  CDS (1)..(1464)

SEQ ID NO: 4172 - protein, 487 aa, Arabidopsis thaliana; identical to SEQ ID NO: 843

SEQ ID NO: 4173 - DNA, 1131 bp, Malus domestica; identical to SEQ ID NO: 844
  CDS (1)..(1131)

SEQ ID NO: 4174 - protein, 376 aa, Malus domestica; identical to SEQ ID NO: 845

SEQ ID NO: 4175 - DNA, 930 bp, Candidatus Kuenenia stuttgartiensis; identical to SEQ ID NO: 846
  CDS (1)..(930): transl_table=11

SEQ ID NO: 4176 - protein, 309 aa, Candidatus Kuenenia stuttgartiensis; identical to SEQ ID NO: 847

SEQ ID NO: 4177 - DNA, 945 bp, Candidatus Kuenenia stuttgartiensis; identical to SEQ ID NO: 848
  CDS (1)..(945): transl_table=11

SEQ ID NO: 4178 - protein, 314 aa, Candidatus Kuenenia stuttgartiensis; identical to SEQ ID NO: 849

SEQ ID NO: 4179 - DNA, 960 bp, Azospirillum brasilense; identical to SEQ ID NO: 850
  CDS (1)..(960): transl_table=11

SEQ ID NO: 4180 - protein, 319 aa, Azospirillum brasilense; identical to SEQ ID NO: 851

SEQ ID NO: 4181 - DNA, 1020 bp, Allium sativum; identical to SEQ ID NO: 852
  CDS (1)..(1020)

SEQ ID NO: 4182 - protein, 339 aa, Allium sativum; identical to SEQ ID NO: 853

SEQ ID NO: 4183 - DNA, 972 bp, Allium sativum; identical to SEQ ID NO: 854
  CDS (1)..(972)

SEQ ID NO: 4184 - protein, 323 aa, Allium sativum; identical to SEQ ID NO: 855

SEQ ID NO: 4185 - DNA, 1152 bp, Allium sativum; identical to SEQ ID NO: 856
  CDS (1)..(1152)

SEQ ID NO: 4186 - protein, 383 aa, Allium sativum; identical to SEQ ID NO: 857

SEQ ID NO: 4187 - DNA, 978 bp, Nicotiana tabacum; identical to SEQ ID NO: 858
  CDS (1)..(978)

SEQ ID NO: 4188 - protein, 325 aa, Nicotiana tabacum; identical to SEQ ID NO: 859

SEQ ID NO: 4189 - DNA, 1107 bp, Spinacia oleracea; identical to SEQ ID NO: 860
  CDS (1)..(1107)

SEQ ID NO: 4190 - protein, 368 aa, Spinacia oleracea; identical to SEQ ID NO: 861

SEQ ID NO: 4191 - DNA, 975 bp, Arabidopsis thaliana; identical to SEQ ID NO: 862
  CDS (1)..(975)

SEQ ID NO: 4192 - protein, 324 aa, Arabidopsis thaliana; identical to SEQ ID NO: 863

SEQ ID NO: 4193 - DNA, 1068 bp, Salmonella choleraesuis; identical to SEQ ID NO: 864
  CDS (1)..(1068): transl_table=11

SEQ ID NO: 4194 - protein, 355 aa, Salmonella choleraesuis; identical to SEQ ID NO: 865

SEQ ID NO: 4195 - DNA, 1113 bp, Hevea brasiliensis; identical to SEQ ID NO: 866
  CDS (1)..(1113)

SEQ ID NO: 4196 - protein, 370 aa, Hevea brasiliensis; identical to SEQ ID NO: 867

SEQ ID NO: 4197 - DNA, 999 bp, Spinacia oleracea; identical to SEQ ID NO: 868
  CDS (1)..(999)

SEQ ID NO: 4198 - protein, 332 aa, Spinacia oleracea; identical to SEQ ID NO: 869

SEQ ID NO: 4199 - DNA, 1056 bp, Solanum tuberosum; identical to SEQ ID NO: 870
  CDS (1)..(1056)

SEQ ID NO: 4200 - protein, 351 aa, Solanum tuberosum; identical to SEQ ID NO: 871

SEQ ID NO: 4201 - DNA, 969 bp, Propionibacterium freudenreichii subsp; identical to SEQ ID NO: 872
  CDS (1)..(969): transl_table=11

SEQ ID NO: 4202 - protein, 322 aa, Propionibacterium freudenreichii subsp; identical to SEQ ID NO: 873

SEQ ID NO: 4203 - DNA, 927 bp, Propionibacterium freudenreichii subsp; identical to SEQ ID NO: 874
  CDS (1)..(927): transl_table=11

SEQ ID NO: 4204 - protein, 308 aa, Propionibacterium freudenreichii subsp; identical to SEQ ID NO: 875

SEQ ID NO: 4205 - DNA, 1059 bp, Betula verrucosa; identical to SEQ ID NO: 876
  CDS (1)..(1059)

SEQ ID NO: 4206 - protein, 352 aa, Betula verrucosa; identical to SEQ ID NO: 877

SEQ ID NO: 4207 - DNA, 975 bp, Arabidopsis thaliana; identical to SEQ ID NO: 878
  CDS (1)..(975)

SEQ ID NO: 4208 - protein, 324 aa, Arabidopsis thaliana; identical to SEQ ID NO: 879

SEQ ID NO: 4209 - DNA, 972 bp, Arabidopsis thaliana; identical to SEQ ID NO: 880
  CDS (1)..(972)

SEQ ID NO: 4210 - protein, 323 aa, Arabidopsis thaliana; identical to SEQ ID NO: 881

SEQ ID NO: 4211 - DNA, 927 bp, Corynebacterium glutamicum; identical to SEQ ID NO: 882
  CDS (1)..(927): transl_table=11

SEQ ID NO: 4212 - protein, 308 aa, Corynebacterium glutamicum; identical to SEQ ID NO: 883

SEQ ID NO: 4213 - DNA, 1371 bp, Xanthomonas campestris pv; identical to SEQ ID NO: 884
  CDS (1)..(1371): transl_table=11

SEQ ID NO: 4214 - protein, 456 aa, Xanthomonas campestris pv; identical to SEQ ID NO: 885

SEQ ID NO: 4215 - DNA, 1506 bp, Pichia pastoris; identical to SEQ ID NO: 886
  CDS (1)..(1506)

SEQ ID NO: 4216 - protein, 501 aa, Pichia pastoris; identical to SEQ ID NO: 887

SEQ ID NO: 4217 - DNA, 1200 bp, Arabidopsis thaliana; identical to SEQ ID NO: 888
  CDS (1)..(1200)

SEQ ID NO: 4218 - protein, 399 aa, Arabidopsis thaliana; identical to SEQ ID NO: 889

SEQ ID NO: 4219 - DNA, 927 bp, Bacillus stearothermophilus; identical to SEQ ID NO: 890
  CDS (1)..(927): transl_table=11

SEQ ID NO: 4220 - protein, 308 aa, Bacillus stearothermophilus; identical to SEQ ID NO: 891

SEQ ID NO: 4221 - DNA, 933 bp, Selenomonas ruminantium; identical to SEQ ID NO: 892
  CDS (1)..(933): transl_table=11

SEQ ID NO: 4222 - protein, 310 aa, Selenomonas ruminantium; identical to SEQ ID NO: 893

SEQ ID NO: 4223 - DNA, 1131 bp, Solanum tuberosum; identical to SEQ ID NO: 894
  CDS (1)..(1131)

SEQ ID NO: 4224 - protein, 376 aa, Solanum tuberosum; identical to SEQ ID NO: 895

SEQ ID NO: 4225 - DNA, 1161 bp, Solanum tuberosum; identical to SEQ ID NO: 896
  CDS (1)..(1161)

SEQ ID NO: 4226 - protein, 386 aa, Solanum tuberosum; identical to SEQ ID NO: 897

SEQ ID NO: 4227 - DNA, 1044 bp, Solanum tuberosum; identical to SEQ ID NO: 898
  CDS (1)..(1044)

SEQ ID NO: 4228 - protein, 347 aa, Solanum tuberosum; identical to SEQ ID NO: 899

SEQ ID NO: 4229 - DNA, 975 bp, Nicotiana tabacum; identical to SEQ ID NO: 900
  CDS (1)..(975)

SEQ ID NO: 4230 - protein, 324 aa, Nicotiana tabacum; identical to SEQ ID NO: 901

SEQ ID NO: 4231 - DNA, 927 bp, Methanosarcina thermophila; identical to SEQ ID NO: 902
  CDS (1)..(927): transl_table=11

SEQ ID NO: 4232 - protein, 308 aa, Methanosarcina thermophila; identical to SEQ ID NO: 903

SEQ ID NO: 4233 - DNA, 972 bp, Salmonella enterica subsp; identical to SEQ ID NO: 904
  CDS (1)..(972): transl_table=11

SEQ ID NO: 4234 - protein, 323 aa, Salmonella enterica subsp; identical to SEQ ID NO: 905

SEQ ID NO: 4235 - DNA, 915 bp, Clostridium sticklandii; identical to SEQ ID NO: 906
  CDS (1)..(915): transl_table=11

SEQ ID NO: 4236 - protein, 304 aa, Clostridium sticklandii; identical to SEQ ID NO: 907

SEQ ID NO: 4237 - DNA, 918 bp, Arabidopsis thaliana; identical to SEQ ID NO: 908
  CDS (1)..(918)

SEQ ID NO: 4238 - protein, 305 aa, Arabidopsis thaliana; identical to SEQ ID NO: 909

SEQ ID NO: 4239 - DNA, 978 bp, Allium tuberosum; identical to SEQ ID NO: 910
  CDS (1)..(978)

SEQ ID NO: 4240 - protein, 325 aa, Allium tuberosum; identical to SEQ ID NO: 911

SEQ ID NO: 4241 - DNA, 1014 bp, Zymomonas mobilis; identical to SEQ ID NO: 912
  CDS (1)..(1014): transl_table=11

SEQ ID NO: 4242 - protein, 337 aa, Zymomonas mobilis; identical to SEQ ID NO: 913

SEQ ID NO: 4243 - DNA, 927 bp, Streptococcus suis; identical to SEQ ID NO: 914
  CDS (1)..(927): transl_table=11

SEQ ID NO: 4244 - protein, 308 aa, Streptococcus suis; identical to SEQ ID NO: 915

SEQ ID NO: 4245 - DNA, 966 bp, Oryza sativa subsp; identical to SEQ ID NO: 916
  CDS (1)..(966)

SEQ ID NO: 4246 - protein, 321 aa, Oryza sativa subsp; identical to SEQ ID NO: 917

SEQ ID NO: 4247 - DNA, 1056 bp, Schizosaccharomyces pombe; identical to SEQ ID NO: 918
  CDS (1)..(1056)

SEQ ID NO: 4248 - protein, 351 aa, Schizosaccharomyces pombe; identical to SEQ ID NO: 919

SEQ ID NO: 4249 - DNA, 975 bp, Brassica juncea; identical to SEQ ID NO: 920
  CDS (1)..(975)

SEQ ID NO: 4250 - protein, 324 aa, Brassica juncea; identical to SEQ ID NO: 921

SEQ ID NO: 4251 - DNA, 1188 bp, Schizosaccharomyces pombe; identical to SEQ ID NO: 922
  CDS (1)..(1188)

SEQ ID NO: 4252 - protein, 395 aa, Schizosaccharomyces pombe; identical to SEQ ID NO: 923

SEQ ID NO: 4253 - DNA, 1215 bp, Arabidopsis thaliana; identical to SEQ ID NO: 924
  CDS (1)..(1215)

SEQ ID NO: 4254 - protein, 404 aa, Arabidopsis thaliana; identical to SEQ ID NO: 925

SEQ ID NO: 4255 - DNA, 1293 bp, Arabidopsis thaliana; identical to SEQ ID NO: 926
  CDS (1)..(1293)

SEQ ID NO: 4256 - protein, 430 aa, Arabidopsis thaliana; identical to SEQ ID NO: 927

SEQ ID NO: 4257 - DNA, 1179 bp, Arabidopsis thaliana; identical to SEQ ID NO: 928
  CDS (1)..(1179)

SEQ ID NO: 4258 - protein, 392 aa, Arabidopsis thaliana; identical to SEQ ID NO: 929

SEQ ID NO: 4259 - DNA, 1125 bp, Capsicum annuum; identical to SEQ ID NO: 930
  CDS (1)..(1125)

SEQ ID NO: 4260 - protein, 374 aa, Capsicum annuum; identical to SEQ ID NO: 931

SEQ ID NO: 4261 - DNA, 1161 bp, Solanum tuberosum; identical to SEQ ID NO: 932
  CDS (1)..(1161)

SEQ ID NO: 4262 - protein, 386 aa, Solanum tuberosum; identical to SEQ ID NO: 933

SEQ ID NO: 4263 - DNA, 927 bp, Bacillus subtilis; identical to SEQ ID NO: 934
  CDS (1)..(927): transl_table=11

SEQ ID NO: 4264 - protein, 308 aa, Bacillus subtilis; identical to SEQ ID NO: 935

SEQ ID NO: 4265 - DNA, 948 bp, Buchnera aphidicola subsp; identical to SEQ ID NO: 936
  CDS (1)..(948): transl_table=11

SEQ ID NO: 4266 - protein, 315 aa, Buchnera aphidicola subsp; identical to SEQ ID NO: 937

SEQ ID NO: 4267 - DNA, 969 bp, Buchnera aphidicola subsp; identical to SEQ ID NO: 938
  CDS (1)..(969): transl_table=11

SEQ ID NO: 4268 - protein, 322 aa, Buchnera aphidicola subsp; identical to SEQ ID NO: 939

SEQ ID NO: 4269 - DNA, 1113 bp, Emericella nidulans; identical to SEQ ID NO: 940
  CDS (1)..(1113)

SEQ ID NO: 4270 - protein, 370 aa, Emericella nidulans; identical to SEQ ID NO: 941

SEQ ID NO: 4271 - DNA, 951 bp, Haemophilus influenzae; identical to SEQ ID NO: 942
  CDS (1)..(951): transl_table=11

SEQ ID NO: 4272 - protein, 316 aa, Haemophilus influenzae; identical to SEQ ID NO: 943

SEQ ID NO: 4273 - DNA, 978 bp, Zea mays; identical to SEQ ID NO: 944
  CDS (1)..(978)

SEQ ID NO: 4274 - protein, 325 aa, Zea mays; identical to SEQ ID NO: 945

SEQ ID NO: 4275 - DNA, 933 bp, Mycobacterium bovis; identical to SEQ ID NO: 946
  CDS (1)..(933): transl_table=11

SEQ ID NO: 4276 - protein, 310 aa, Mycobacterium bovis; identical to SEQ ID NO: 947

SEQ ID NO: 4277 - DNA, 933 bp, Mycobacterium leprae; identical to SEQ ID NO: 948
  CDS (1)..(933): transl_table=11

SEQ ID NO: 4278 - protein, 310 aa, Mycobacterium leprae; identical to SEQ ID NO: 949

SEQ ID NO: 4279 - DNA, 933 bp, Neisseria meningitidis serogroup B; identical to SEQ ID NO: 950
  CDS (1)..(933): transl_table=11

SEQ ID NO: 4280 - protein, 310 aa, Neisseria meningitidis serogroup B; identical to SEQ ID NO: 951

SEQ ID NO: 4281 - DNA, 972 bp, Salmonella typhi; identical to SEQ ID NO: 952
  CDS (1)..(972): transl_table=11

SEQ ID NO: 4282 - protein, 323 aa, Salmonella typhi; identical to SEQ ID NO: 953

SEQ ID NO: 4283 - DNA, 978 bp, Solanum tuberosum; identical to SEQ ID NO: 954
  CDS (1)..(978)

SEQ ID NO: 4284 - protein, 325 aa, Solanum tuberosum; identical to SEQ ID NO: 955

SEQ ID NO: 4285 - DNA, 978 bp, Spinacia oleracea; identical to SEQ ID NO: 956
  CDS (1)..(978)

SEQ ID NO: 4286 - protein, 325 aa, Spinacia oleracea [sequence omitted]

SEQ ID NO: 4287 - DNA, 933 bp, Staphylococcus aureus; identical to SEQ ID NO: 958
  CDS (1)..(933): transl_table=11

SEQ ID NO: 4288 - protein, 310 aa, Staphylococcus aureus; identical to SEQ ID NO: 959

SEQ ID NO: 4289 - DNA, 933 bp, Staphylococcus epidermidis; identical to SEQ ID NO: 960
  CDS (1)..(933): transl_table=11

SEQ ID NO: 4290 - protein, 310 aa, Staphylococcus epidermidis; identical to SEQ ID NO: 961

SEQ ID NO: 4291 - DNA, 984 bp, Aquifex aeolicus; identical to SEQ ID NO: 964
  CDS (1)..(984): transl_table=11

SEQ ID NO: 4292 - protein, 327 aa, Aquifex aeolicus; identical to SEQ ID NO: 965

SEQ ID NO: 4293 - DNA, 936 bp, Bacillus subtilis; identical to SEQ ID NO: 966
  CDS (1)..(936): transl_table=11

SEQ ID NO: 4294 - protein, 311 aa, Bacillus subtilis; identical to SEQ ID NO: 967

SEQ ID NO: 4295 - DNA, 900 bp, Campylobacter jejuni; identical to SEQ ID NO: 968
  CDS (1)..(900): transl_table=11

SEQ ID NO: 4296 - protein, 299 aa, Campylobacter jejuni; identical to SEQ ID NO: 969

SEQ ID NO: 4297 - DNA, 921 bp, Helicobacter pylori; identical to SEQ ID NO: 970
  CDS (1)..(921): transl_table=11

SEQ ID NO: 4298 - protein, 306 aa, Helicobacter pylori; identical to SEQ ID NO: 971

SEQ ID NO: 4299 - DNA, 972 bp, Mycobacterium bovis; identical to SEQ ID NO: 972
  CDS (1)..(972): transl_table=11

SEQ ID NO: 4300 - protein, 323 aa, Mycobacterium bovis; identical to SEQ ID NO: 973

SEQ ID NO: 4301 - DNA, 900 bp, Pseudomonas aeruginosa; identical to SEQ ID NO: 974
  CDS (1)..(900): transl_table=11

SEQ ID NO: 4302 - protein, 299 aa, Pseudomonas aeruginosa; identical to SEQ ID NO: 975

SEQ ID NO: 4303 - DNA, 912 bp, Salmonella typhimurium; identical to SEQ ID NO: 976
  CDS (1)..(912): transl_table=11

SEQ ID NO: 4304 - protein, 303 aa, Salmonella typhimurium; identical to SEQ ID NO: 977

SEQ ID NO: 4305 - DNA, 990 bp, Synechococcus sp; identical to SEQ ID NO: 978
  CDS (1)..(990): transl_table=11

SEQ ID NO: 4306 - protein, 329 aa, Synechococcus sp; identical to SEQ ID NO: 979

SEQ ID NO: 4307 - DNA, 1011 bp, Rhizobium sp; identical to SEQ ID NO: 980
  CDS (1)..(1011): transl_table=11

SEQ ID NO: 4308 - protein, 336 aa, Rhizobium sp; identical to SEQ ID NO: 981

SEQ ID NO: 4309 - DNA, 1179 bp, Oryza sativa; identical to SEQ ID NO: 982
  CDS (1)..(1179)

SEQ ID NO: 4310 - protein, 392 aa, Oryza sativa; identical to SEQ ID NO: 983

SEQ ID NO: 4311 - DNA, 1185 bp, Oryza sativa; identical to SEQ ID NO: 984
  CDS (1)..(1185)

SEQ ID NO: 4312 - protein, 394 aa, Oryza sativa; identical to SEQ ID NO: 985

SEQ ID NO: 4313 - DNA, 1023 bp, Oryza sativa; identical to SEQ ID NO: 986
  CDS (1)..(1023)

SEQ ID NO: 4314 - protein, 340 aa, Oryza sativa; identical to SEQ ID NO: 987

SEQ ID NO: 4315 - DNA, 978 bp, Oryza sativa; identical to SEQ ID NO: 988
  CDS (1)..(978)

SEQ ID NO: 4316 - protein, 325 aa, Oryza sativa; identical to SEQ ID NO: 989

SEQ ID NO: 4317 - DNA, 1134 bp, Oryza sativa; identical to SEQ ID NO: 990
  CDS (1)..(1134)

SEQ ID NO: 4318 - protein, 377 aa, Oryza sativa; identical to SEQ ID NO: 991

SEQ ID NO: 4319 - DNA, 1020 bp, Oryza sativa; identical to SEQ ID NO: 992
  CDS (1)..(1020)

SEQ ID NO: 4320 - protein, 339 aa, Oryza sativa; identical to SEQ ID NO: 993

SEQ ID NO: 4321 - DNA, 1044 bp, Oryza sativa; identical to SEQ ID NO: 994
  CDS (1)..(1044)

SEQ ID NO: 4322 - protein, 347 aa, Oryza sativa; identical to SEQ ID NO: 995

SEQ ID NO: 4323 - DNA, 1074 bp, Oryza sativa; identical to SEQ ID NO: 996
  CDS (1)..(1074)

SEQ ID NO: 4324 - protein, 357 aa, Oryza sativa; identical to SEQ ID NO: 997

SEQ ID NO: 4325 - DNA, 1029 bp, Oryza sativa; identical to SEQ ID NO: 998
  CDS (1)..(1029)

SEQ ID NO: 4326 - protein, 342 aa, Oryza sativa; identical to SEQ ID NO: 999

SEQ ID NO: 4327 - DNA, 1227 bp, Oryza sativa; identical to SEQ ID NO: 1000
  CDS (1)..(1227)

SEQ ID NO: 4328 - protein, 408 aa, Oryza sativa; identical to SEQ ID NO: 1001

SEQ ID NO: 4329 - DNA, 1179 bp, Brassica napus; identical to SEQ ID NO: 1002
  CDS (1)..(1179)

SEQ ID NO: 4330 - protein, 392 aa, Brassica napus; identical to SEQ ID NO: 1003

SEQ ID NO: 4331 - DNA, 1179 bp, Brassica napus; identical to SEQ ID NO: 1004
  CDS (1)..(1179)

SEQ ID NO: 4332 - protein, 392 aa, Brassica napus; identical to SEQ ID NO: 1005

SEQ ID NO: 4333 - DNA, 978 bp, Glycine max; identical to SEQ ID NO: 1006
  CDS (1)..(978)

SEQ ID NO: 4334 - protein, 325 aa, Glycine max; identical to SEQ ID NO: 1007

SEQ ID NO: 4335 - DNA, 1197 bp, Zea mays; identical to SEQ ID NO: 1008
  CDS (1)..(1197)

SEQ ID NO: 4336 - protein, 398 aa, Zea mays; identical to SEQ ID NO: 1009

SEQ ID NO: 4337 - DNA, 1140 bp, Hordeum vulgare; identical to SEQ ID NO: 1010
  CDS (1)..(1140)

SEQ ID NO: 4338 - protein, 379 aa, Hordeum vulgare; identical to SEQ ID NO: 1011

SEQ ID NO: 4339 - DNA, 1137 bp, Helianthus annuus; identical to SEQ ID NO: 1012
  CDS (1)..(1137)

SEQ ID NO: 4340 - protein, 378 aa, Helianthus annuus; identical to SEQ ID NO: 1013

SEQ ID NO: 4341 - DNA, 1050 bp, Zea mays; identical to SEQ ID NO: 1014
  CDS (1)..(1050)

SEQ ID NO: 4342 - protein, 349 aa, Zea mays; identical to SEQ ID NO: 1015

SEQ ID NO: 4343 - DNA, 1047 bp, Brassica napus; identical to SEQ ID NO: 1016
  CDS (1)..(1047)

SEQ ID NO: 4344 - protein, 348 aa, Brassica napus; identical to SEQ ID NO: 1017

SEQ ID NO: 4345 - DNA, 969 bp, Brassica napus; identical to SEQ ID NO: 1018
  CDS (1)..(969)

SEQ ID NO: 4346 - protein, 322 aa, Brassica napus; identical to SEQ ID NO: 1019

SEQ ID NO: 4347 - DNA, 1290 bp, Brassica napus; identical to SEQ ID NO: 1020
  CDS (1)..(1290)

SEQ ID NO: 4348 - protein, 429 aa, Brassica napus; identical to SEQ ID NO: 1021

SEQ ID NO: 4349 - DNA, 1107 bp, Brassica napus; identical to SEQ ID NO: 1022
  CDS (1)..(1107)

SEQ ID NO: 4350 - protein, 368 aa, Brassica napus; identical to SEQ ID NO: 1023

SEQ ID NO: 4351 - DNA, 1191 bp, Brassica napus; identical to SEQ ID NO: 1024
  CDS (1)..(1191)

SEQ ID NO: 4352 - protein, 396 aa, Brassica napus; identical to SEQ ID NO: 1025

SEQ ID NO: 4353 - DNA, 969 bp, Brassica napus; identical to SEQ ID NO: 1026
  CDS (1)..(969)

SEQ ID NO: 4354 - protein, 322 aa, Brassica napus; identical to SEQ ID NO: 1027

SEQ ID NO: 4355 - DNA, 1293 bp, Brassica napus; identical to SEQ ID NO: 1028
  CDS (1)..(1293)

SEQ ID NO: 4356 - protein, 430 aa, Brassica napus; identical to SEQ ID NO: 1029

SEQ ID NO: 4357 - DNA, 1119 bp, Glycine max; identical to SEQ ID NO: 1030
  CDS (1)..(1119)

SEQ ID NO: 4358 - protein, 372 aa, Glycine max; identical to SEQ ID NO: 1031

SEQ ID NO: 4359 - DNA, 1170 bp, Glycine max; identical to SEQ ID NO: 1032
  CDS (1)..(1170)

SEQ ID NO: 4360 - protein, 389 aa, Glycine max; identical to SEQ ID NO: 1033

SEQ ID NO: 4361 - DNA, 1122 bp, Hordeum vulgare; identical to SEQ ID NO: 1034
  CDS (1)..(1122)

SEQ ID NO: 4362 - protein, 373 aa, Hordeum vulgare; identical to SEQ ID NO: 1035

SEQ ID NO: 4363 - DNA, 1170 bp, Hordeum vulgare; identical to SEQ ID NO: 1036
  CDS (1)..(1170)

SEQ ID NO: 4364 - protein, 389 aa, Hordeum vulgare; identical to SEQ ID NO: 1037

SEQ ID NO: 4365 - DNA, 1128 bp, Hordeum vulgare; identical to SEQ ID NO: 1038
  CDS (1)..(1128)

SEQ ID NO: 4366 - protein, 375 aa, Hordeum vulgare; identical to SEQ ID NO: 1039

SEQ ID NO: 4367 - DNA, 978 bp, Hordeum vulgare; identical to SEQ ID NO: 1040
  CDS (1)..(978)

SEQ ID NO: 4368 - protein, 325 aa, Hordeum vulgare; identical to SEQ ID NO: 1041

SEQ ID NO: 4369 - DNA, 972 bp, Brassica napus; identical to SEQ ID NO: 1042
  CDS (1)..(972)

SEQ ID NO: 4370 - protein, 323 aa, Brassica napus; identical to SEQ ID NO: 1043

SEQ ID NO: 4371 - DNA, 978 bp, Triticum aestivum; identical to SEQ ID NO: 1044
  CDS (1)..(978)

SEQ ID NO: 4372 - protein, 325 aa, Triticum aestivum; identical to SEQ ID NO: 1045

SEQ ID NO: 4373 - DNA, 1137 bp, Triticum aestivum; identical to SEQ ID NO: 1046
  CDS (1)..(1137)

SEQ ID NO: 4374 - protein, 378 aa, Triticum aestivum; identical to SEQ ID NO: 1047

SEQ ID NO: 4375 - DNA, 1047 bp, Triticum aestivum; identical to SEQ ID NO: 1048
  CDS (1)..(1047)

SEQ ID NO: 4376 - protein, 348 aa, Triticum aestivum; identical to SEQ ID NO: 1049

SEQ ID NO: 4377 - DNA, 1104 bp, Triticum aestivum; identical to SEQ ID NO: 1050
  CDS (1)..(1104)

SEQ ID NO: 4378 - protein, 367 aa, Triticum aestivum; identical to SEQ ID NO: 1051

SEQ ID NO: 4379 - DNA, 978 bp, Triticum aestivum; identical to SEQ ID NO: 1052
  CDS (1)..(978)

SEQ ID NO: 4380 - protein, 325 aa, Triticum aestivum; identical to SEQ ID NO: 1053

SEQ ID NO: 4381 - DNA, 1041 bp, Zea mays; identical to SEQ ID NO: 1054
  CDS (1)..(1041)

SEQ ID NO: 4382 - protein, 346 aa, Zea mays; identical to SEQ ID NO: 1055

SEQ ID NO: 4383 - DNA, 1323 bp, Zea mays; identical to SEQ ID NO: 1056
  CDS (1)..(1323)

SEQ ID NO: 4384 - protein, 440 aa, Zea mays; identical to SEQ ID NO: 1057

SEQ ID NO: 4385 - DNA, 1191 bp, Zea mays; identical to SEQ ID NO: 1058
  CDS (1)..(1191)

SEQ ID NO: 4386 - protein, 396 aa, Zea mays; identical to SEQ ID NO: 1059

SEQ ID NO: 4387 - DNA, 978 bp, Zea mays; identical to SEQ ID NO: 1060
  CDS (1)..(978)

SEQ ID NO: 4388 - protein, 325 aa, Zea mays; identical to SEQ ID NO: 1061

SEQ ID NO: 4389 - DNA, 1155 bp, Zea mays; identical to SEQ ID NO: 1062
  CDS (1)..(1155)

SEQ ID NO: 4390 - protein, 384 aa, Zea mays; identical to SEQ ID NO: 1063

SEQ ID NO: 4391 - DNA, 978 bp, Zea mays; identical to SEQ ID NO: 1064
  CDS (1)..(978)

SEQ ID NO: 4392 - protein, 325 aa, Zea mays; identical to SEQ ID NO: 1065

SEQ ID NO: 4393 - DNA, 1149 bp, Zea mays; identical to SEQ ID NO: 1066
  CDS (1)..(1149)

SEQ ID NO: 4394 - protein, 382 aa, Zea mays; identical to SEQ ID NO: 1067

SEQ ID NO: 4395 - DNA, 1191 bp, Zea mays; identical to SEQ ID NO: 1068
  CDS (1)..(1191)

SEQ ID NO: 4396 - protein, 396 aa, Zea mays; identical to SEQ ID NO: 1069

SEQ ID NO: 4397 - DNA, 24 bp, Artificial sequence
  primer
atgagtaagatttttgaagataac

SEQ ID NO: 4398 - DNA, 25 bp, Artificial sequence
  primer
ttactgttgcaattctttctcagtg

SEQ ID NO: 4399 - protein, 387 aa, Artificial sequence; identical to SEQ ID NO: 1072
  consensus sequence
  Variant (2)..(2): Xaa in position 2 is any amino acid
  Variant (5)..(7): Xaa in position 5 to 7 is any amino acid
  Variant (9)..(15): Xaa in position 9 to 15 is any amino acid
  Variant (16)..(28): Xaa in position 16 to 28 is any or no amino acid
  Variant (30)..(30): Xaa in position 30 is any amino acid
  Variant (32)..(34): Xaa in position 32 to 34 is any amino acid
  Variant (35)..(35): Xaa in position 35 is any or no amino acid
  Variant (37)..(38): Xaa in position 37 to 38 is any amino acid
  Variant (39)..(40): Xaa in position 39 to 40 is any or no amino acid
  Variant (46)..(53): Xaa in position 46 to 53 is any amino acid
  Variant (56)..(57): Xaa in position 56 to 57 is any amino acid
  Variant (59)..(65): Xaa in position 59 to 65 is any amino acid
  Variant (66)..(69): Xaa in position 66 to 69 is any or no amino acid
  Variant (71)..(71): Xaa in position 71 is any amino acid
  Variant (78)..(78): Xaa in position 78 is any amino acid
  Variant (80)..(80): Xaa in position 80 is any amino acid
  Variant (83)..(84): Xaa in position 83 to 84 is any amino acid
  Variant (85)..(88): Xaa in position 85 to 88 is any or no amino acid
  Variant (91)..(95): Xaa in position 91 to 95 is any amino acid
  Variant (98)..(100): Xaa in position 98 to 100 is any amino acid
  Variant (102)..(102): Xaa in position 102 is any amino acid
  Variant (104)..(111): Xaa in position 104 to 111 is any amino acid
  Variant (114)..(127): Xaa in position 114 to 127 is any amino acid
  Variant (128)..(139): Xaa in position 128 to 139 is any or no amino acid
  Variant (141)..(153): Xaa in position 141 to 153 is any amino acid
  Variant (154)..(170): Xaa in position 154 to 170 is any or no amino acid
  Variant (173)..(173): Xaa in position 173 is any amino acid
  Variant (175)..(176): Xaa in position 175 to 176 is any amino acid
  Variant (178)..(179): Xaa in position 178 to 179 is any amino acid
  Variant (180)..(180): Xaa in position 180 is any or no amino acid
  Variant (182)..(183): Xaa in position 182 to 183 is any amino acid
  Variant (186)..(186): Xaa in position 186 is any amino acid
  Variant (187)..(187): Xaa in position 187 is any or no amino acid
  Variant (190)..(192): Xaa in position 190 to 192 is any amino acid
  Variant (193)..(208): Xaa in position 193 to 208 is any or no amino acid
  Variant (210)..(215): Xaa in position 210 to 215 is any amino acid
  Variant (221)..(222): Xaa in position 221 to 222 is any amino acid
  Variant (224)..(227): Xaa in position 224 to 227 is any amino acid
  Variant (230)..(239): Xaa in position 230 to 239 is any amino acid
  Variant (240)..(243): Xaa in position 240 to 243 is any or no amino acid
  Variant (245)..(251): Xaa in position 245 to 251 is any amino acid
  Variant (252)..(288): Xaa in position 252 to 288 is any or no amino acid
  Variant (290)..(290): Xaa in position 290 is any amino acid
  Variant (292)..(293): Xaa in position 292 to 293 is any amino acid
  Variant (294)..(298): Xaa in position 294 to 298 is any or no amino acid
  Variant (300)..(306): Xaa in position 300 to 306 is any amino acid
  Variant (307)..(309): Xaa in position 307 to 309 is any or no amino acid
  Variant (311)..(319): Xaa in position 311 to 319 is any amino acid
  Variant (320)..(323): Xaa in position 320 to 323 is any or no amino acid
  Variant (325)..(330): Xaa in position 325 to 330 is any amino acid
  Variant (331)..(331): Xaa in position 331 is any or no amino acid
  Variant (333)..(334): Xaa in position 333 to 334 is any amino acid
  Variant (335)..(335): Xaa in position 335 is any or no amino acid
  Variant (338)..(340): Xaa in position 338 to 340 is any amino acid
  Variant (342)..(342): Xaa in position 342 is any amino acid
  Variant (344)..(344): Xaa in position 344 is any amino acid
  Variant (346)..(347): Xaa in position 346 to 347 is any amino acid
  Variant (348)..(349): Xaa in position 348 to 349 is any or no amino acid
  Variant (352)..(368): Xaa in position 352 to 368 is any amino acid
  Variant (369)..(378): Xaa in position 369 to 378 is any or no amino acid
  Variant (380)..(380): Xaa in position 380 is any amino acid
  Variant (381)..(383): Xaa in position 381 to 383 is any or no amino acid

SEQ ID NO: 4400 - protein, 12 aa, Artificial sequence
  protein pattern
  Variant (2)..(2): Xaa in position 2 is any amino acid
  Variant (4)..(4): Xaa in position 4 is Ala, Gly, Ser or Thr
  Variant (9)..(10): Xaa in position 9 to 10 is any or no amino acid
  Variant (12)..(12): Xaa in position 12 is Ala, Gly or Ser
EXTXGNTGXXIX

SEQ ID NO: 4401 - protein, 14 aa, Artificial sequence
  protein pattern
  Variant (2)..(2): Xaa in position 2 is Ser or Thr
  Variant (3)..(3): Xaa in position 3 is Gly or Thr
  Variant (6)..(7): Xaa in position 6 to 7 is any amino acid
  Variant (9)..(9): Xaa in position 9 is any amino acid
  Variant (10)..(10): Xaa in position 10 is Ala, Gly, Ser or Thr
  Variant (11)..(13): Xaa in position 11 to 13 is any amino acid
GXXGTXXGXXXXXK

SEQ ID NO: 4402 - protein, 14 aa, Artificial sequence
  protein pattern
  Variant (3)..(3): Xaa in position 3 is Ile, Leu or Val
  Variant (4)..(5): Xaa in position 4 to 5 is any amino acid
  Variant (7)..(7): Xaa in position 7 is any amino acid
  Variant (9)..(9): Xaa in position 9 is Ala, Cys, Gly, Ser or Thr
  Variant (11)..(13): Xaa in position 11 to 13 is any or no amino acid
EGXXXGXSXGXXXA

SEQ ID NO: 4403 - DNA, 1113 bp, Glycine max
  CDS (1)..(1113)
atggaggaagttcaagagtctcaaacccaatcatcgctcggtcaagaagaggaaaatgaagtgattactgaaagttcagcatttgttaagggggaaccggcaccagaattcagtagtaaccccccaaaagttgattctgaagttgaggtccttcatgagaaggtcagcaaacaaatcattaaggaaggtcatggccagaaaccttccaaatattcaacttgcttcttccattacagggcgtgggctgagaaatcacaacacaagtttgaagacacatggcaggagcaacggccaattgagatggtcttaggaaaagaaaagaaagaaatgactgggttgggcattggtgtggcaagcatgaaagctggggagcgtgcgttggtgcgtgtgggctgggaattaggatatggagaggaaggaagcttctcttttccaaatgttccacccaaggcagatttagtttatgaagttgagctcattggctttgatgaaacaaaagaagggaaagctcgcagtgatatgactgtggaggaaagaattggtgcagcagaccggagaaagatggatggaaatgctttgtatcaggaagaaaaactagaggaggctatgcaacagtatgaaatggccattgcatatatgggagatgacttcatgttccagttgtttgggaagtatagagatatggctctggcagtaaagaatccatgccatcttaacatggcagcctgtttgattaagctgaaccgctacgaagaagccataggacaatgcagcattgtactgggtgaggatgagaacaatgtgaaggcattatttaggcgaggtaaggctagagcagcacttgggcaaacggatactgccagggaagattttctaaaggcaagtaaatatgcccctcaagacaaagcaattgctaaagaattgagattgcttgctgaacatgacaaggctgtttaccaaaagcagaaagagatatataaaggaatatttggaccaaggcctcaaccagttcctaagccaagaaattggctcatacttatttggcagtggttgctttcagtattctatggccttgtcacgctcttcaagcgtcaaaggcataaatctgactaa

SEQ ID NO: 4404 - protein, 370 aa, Glycine max
MEEVQESQTQSSLGQEEENEVITESSAFVKGEPAPEFSSNPPKVDSEVEVLHEKVSKQIIKEGHGQKPSKYSTCFFHYRAWAEKSQHKFEDTWQEQRPIEMVLGKEKKEMTGLGIGVASMKAGERALVRVGWELGYGEEGSFSFPNVPPKADLVYEVELIGFDETKEGKARSDMTVEERIGAADRRKMDGNALYQEEKLEEAMQQYEMAIAYMGDDFMFQLFGKYRDMALAVKNPCHLNMAACLIKLNRYEEAIGQCSIVLGEDENNVKALFRRGKARAALGQTDTAREDFLKASKYAPQDKAIAKELRLLAEHDKAVYQKQKEIYKGIFGPRPQPVPKPRNWLILIWQWLLSVFYGLVTLFKRQRHKSD

SEQ ID NO: 4405 - DNA, 1553 bp, Triticum aestivum; identical to SEQ ID NO: 1704
  CDS (89)..(1201)

SEQ ID NO: 4406 - protein, 370 aa, Triticum aestivum; identical to SEQ ID NO: 1705

SEQ ID NO: 4407 - DNA, 1853 bp, Pinus radiata; identical to SEQ ID NO: 1706
  CDS (481)..(1611)

SEQ ID NO: 4408 - protein, 376 aa, Pinus radiata; identical to SEQ ID NO: 1707

SEQ ID NO: 4409 - DNA, 1673 bp, Glycine max; identical to SEQ ID NO: 1708
  CDS (163)..(1296)

SEQ ID NO: 4410 - protein, 377 aa, Glycine max; identical to SEQ ID NO: 1709

SEQ ID NO: 4411 - DNA, 1349 bp, Magnoliophyta; identical to SEQ ID NO: 1710
  CDS (95)..(1192)

SEQ ID NO: 4412 - protein, 365 aa, Magnoliophyta; identical to SEQ ID NO: 1711

SEQ ID NO: 4413 - DNA, 1113 bp, Glycine max; identical to SEQ ID NO: 1712
  CDS (1)..(1113)

SEQ ID NO: 4414 - protein, 370 aa, Glycine max; identical to SEQ ID NO: 1713

SEQ ID NO: 4415 - DNA, 963 bp, Oryza sativa Japonica Group; identical to SEQ ID NO: 1714
  CDS (1)..(963)

SEQ ID NO: 4416 - protein, 320 aa, Oryza sativa Japonica Group; identical to SEQ ID NO: 1715

SEQ ID NO: 4417 - DNA, 1224 bp, Physcomitrella patens subsp. patens; identical to SEQ ID NO: 1716
  CDS (1)..(1224)

SEQ ID NO: 4418 - protein, 407 aa, Physcomitrella patens subsp. patens; identical to SEQ ID NO: 1717

SEQ ID NO: 4419 - DNA, 1128 bp, Oryza sativa subsp; identical to SEQ ID NO: 1718
  CDS (1)..(1128)

SEQ ID NO: 4420 - protein, 375 aa, Oryza sativa subsp; identical to SEQ ID NO: 1719

SEQ ID NO: 4421 - DNA, 2157 bp, Oryza sativa subsp; identical to SEQ ID NO: 1720
  CDS (1)..(2157)

SEQ ID NO: 4422 - protein, 718 aa, Oryza sativa subsp; identical to SEQ ID NO: 1721

SEQ ID NO: 4423 - DNA, 1149 bp, Oryza sativa subsp; identical to SEQ ID NO: 1722
  CDS (1)..(1149)

SEQ ID NO: 4424 - protein, 382 aa, Oryza sativa subsp; identical to SEQ ID NO: 1723

SEQ ID NO: 4425 - DNA, 1098 bp, Vitis vinifera; identical to SEQ ID NO: 1724
  CDS (1)..(1098)

SEQ ID NO: 4426 - protein, 365 aa, Vitis vinifera; identical to SEQ ID NO: 1725

SEQ ID NO: 4427 - DNA, 1110 bp, Populus trichocarpa; identical to SEQ ID NO: 1726
  CDS (1)..(1110)

SEQ ID NO: 4428 - protein, 369 aa, Populus trichocarpa; identical to SEQ ID NO: 1727

SEQ ID NO: 4429 - DNA, 1098 bp, Arabidopsis thaliana; identical to SEQ ID NO: 1728
  CDS (1)..(1098)

SEQ ID NO: 4430 - protein, 365 aa, Arabidopsis thaliana; identical to SEQ ID NO: 1729

SEQ ID NO: 4431 - DNA, 1758 bp, Oryza sativa; identical to SEQ ID NO: 1730
  CDS (1)..(1758)

SEQ ID NO: 4432 - protein, 585 aa, Oryza sativa; identical to SEQ ID NO: 1731

SEQ ID NO: 4433 - DNA, 1128 bp, Oryza sativa; identical to SEQ ID NO: 1732
  CDS (1)..(1128)

SEQ ID NO: 4434 - protein, 375 aa, Oryza sativa; identical to SEQ ID NO: 1733

SEQ ID NO: 4435 - DNA, 1113 bp, Oryza sativa; identical to SEQ ID NO: 1734
  CDS (1)..(1113)

SEQ ID NO: 4436 - protein, 370 aa, Oryza sativa; identical to SEQ ID NO: 1735

SEQ ID NO: 4437 - DNA, 1686 bp, Brassica napus; identical to SEQ ID NO: 1736
  CDS (1)..(1686)

SEQ ID NO: 4438 - protein, 561 aa, Brassica napus; identical to SEQ ID NO: 1737

SEQ ID NO: 4439 - DNA, 1107 bp, Brassica napus; identical to SEQ ID NO: 1738
  CDS (1)..(1107)

SEQ ID NO: 4440 - protein, 368 aa, Brassica napus; identical to SEQ ID NO: 1739

SEQ ID NO: 4441 - DNA, 1653 bp, Brassica napus; identical to SEQ ID NO: 1740
  CDS (1)..(1653)

SEQ ID NO: 4442 - protein, 550 aa, Brassica napus; identical to SEQ ID NO: 1741

SEQ ID NO: 4443 - DNA, 1722 bp, Brassica napus; identical to SEQ ID NO: 1742
  CDS (1)..(1722)

SEQ ID NO: 4444 - protein, 573 aa, Brassica napus; identical to SEQ ID NO: 1743

SEQ ID NO: 4445 - DNA, 1752 bp, Glycine max; identical to SEQ ID NO: 1744
  CDS (1)..(1752)

SEQ ID NO: 4446 - protein, 583 aa, Glycine max; identical to SEQ ID NO: 1745

SEQ ID NO: 4447 - DNA, 1113 bp, Glycine max; identical to SEQ ID NO: 1746
  CDS (1)..(1113)

SEQ ID NO: 4448 - protein, 370 aa, Glycine max; identical to SEQ ID NO: 1747

SEQ ID NO: 4449 - DNA, 1713 bp, Glycine max; identical to SEQ ID NO: 1748
  CDS (1)..(1713)

SEQ ID NO: 4450 - protein, 570 aa, Glycine max; identical to SEQ ID NO: 1749

SEQ ID NO: 4451 - DNA, 1131 bp, Hordeum vulgare; identical to SEQ ID NO: 1750
  CDS (1)..(1131)

SEQ ID NO: 4452 - protein, 376 aa, Hordeum vulgare; identical to SEQ ID NO: 1751

SEQ ID NO: 4453 - DNA, 1680 bp, Hordeum vulgare; identical to SEQ ID NO: 1752
  CDS (1)..(1680)

SEQ ID NO: 4454 - protein, 559 aa, Hordeum vulgare; identical to SEQ ID NO: 1753

SEQ ID NO: 4455 - DNA, 1749 bp, Glycine max; identical to SEQ ID NO: 1754
  CDS (1)..(1749)

SEQ ID NO: 4456 - protein, 582 aa, Glycine max; identical to SEQ ID NO: 1755

SEQ ID NO: 4457 - DNA, 1113 bp, Triticum aestivum; identical to SEQ ID NO: 1756
  CDS (1)..(1113)

SEQ ID NO: 4458 - protein, 370 aa, Triticum aestivum; identical to SEQ ID NO: 1757

SEQ ID NO: 4459 - DNA, 1662 bp, Zea mays; identical to SEQ ID NO: 1758
  CDS (1)..(1662)

SEQ ID NO: 4460 - protein, 553 aa, Zea mays; identical to SEQ ID NO: 1759

SEQ ID NO: 4461 - DNA, 1125 bp, Zea mays; identical to SEQ ID NO: 1760
  CDS (1)..(1125)

SEQ ID NO: 4462 - protein, 374 aa, Zea mays; identical to SEQ ID NO: 1761

SEQ ID NO: 4463 - DNA, 20 bp, Artificial sequence
  primer
atggaggaagttcaagagtc

SEQ ID NO: 4464 - DNA, 21 bp, Artificial sequence
  primer
ttagtcagatttatgcctttc

SEQ ID NO: 4465 - protein, 332 aa, Artificial sequence; identical to SEQ ID NO: 1764
  consensus sequence
  Variant (2)..(8): Xaa in position 2 to 8 is any amino acid
  Variant (9)..(16): Xaa in position 9 to 16 is any or no amino acid
  Variant (19)..(29): Xaa in position 19 to 29 is any amino acid
  Variant (30)..(41): Xaa in position 30 to 41 is any or no amino acid
  Variant (44)..(44): Xaa in position 44 is any amino acid
  Variant (46)..(48): Xaa in position 46 to 48 is any amino acid
  Variant (52)..(52): Xaa in position 52 is any amino acid
  Variant (54)..(55): Xaa in position 54 to 55 is any amino acid
  Variant (56)..(56): Xaa in position 56 is any or no amino acid
  Variant (58)..(83): Xaa in position 58 to 83 is any amino acid
  Variant (85)..(92): Xaa in position 85 to 92 is any amino acid
  Variant (93)..(94): Xaa in position 93 to 94 is any or no amino acid
  Variant (96)..(100): Xaa in position 96 to 100 is any amino acid
  Variant (103)..(105): Xaa in position 103 to 105 is any amino acid
  Variant (107)..(108): Xaa in position 107 to 108 is any amino acid
  Variant (111)..(111): Xaa in position 111 is any amino acid
  Variant (114)..(114): Xaa in position 114 is any amino acid
  Variant (117)..(121): Xaa in position 117 to 121 is any amino acid
  Variant (123)..(125): Xaa in position 123 to 125 is any amino acid
  Variant (127)..(127): Xaa in position 127 is any amino acid
  Variant (128)..(128): Xaa in position 128 is any or no amino acid
  Variant (130)..(135): Xaa in position 130 to 135 is any amino acid
  Variant (136)..(136): Xaa in position 136 is any or no amino acid
  Variant (140)..(144): Xaa in position 140 to 144 is any amino acid
  Variant (150)..(151): Xaa in position 150 to 151 is any amino acid
  Variant (153)..(155): Xaa in position 153 to 155 is any amino acid
  Variant (158)..(162): Xaa in position 158 to 162 is any amino acid
  Variant (163)..(176): Xaa in position 163 to 176 is any or no amino acid
  Variant (178)..(178): Xaa in position 178 is any amino acid
  Variant (181)..(181): Xaa in position 181 is any amino acid
  Variant (183)..(183): Xaa in position 183 is any amino acid
  Variant (186)..(188): Xaa in position 186 to 188 is any amino acid
  Variant (190)..(191): Xaa in position 190 to 191 is any amino acid
  Variant (194)..(195): Xaa in position 194 to 195 is any amino acid
  Variant (198)..(199): Xaa in position 198 to 199 is any amino acid
  Variant (201)..(203): Xaa in position 201 to 203 is any amino acid
  Variant (205)..(207): Xaa in position 205 to 207 is any amino acid
  Variant (210)..(210): Xaa in position 210 is any amino acid
  Variant (212)..(213): Xaa in position 212 to 213 is any amino acid
  Variant (215)..(217): Xaa in position 215 to 217 is any amino acid
  Variant (219)..(220): Xaa in position 219 to 220 is any amino acid
  Variant (222)..(225): Xaa in position 222 to 225 is any amino acid
  Variant (227)..(228): Xaa in position 227 to 228 is any amino acid
  Variant (229)..(230): Xaa in position 229 to 230 is any or no amino acid
  Variant (232)..(232): Xaa in position 232 is any amino acid
  Variant (234)..(234): Xaa in position 234 is any amino acid
  Variant (236)..(237): Xaa in position 236 to 237 is any amino acid
  Variant (239)..(239): Xaa in position 239 is any amino acid
  Variant (242)..(242): Xaa in position 242 is any amino acid
  Variant (246)..(247): Xaa in position 246 to 247 is any amino acid
  Variant (250)..(253): Xaa in position 250 to 253 is any amino acid
  Variant (256)..(258): Xaa in position 256 to 258 is any amino acid
  Variant (260)..(261): Xaa in position 260 to 261 is any amino acid
  Variant (264)..(268): Xaa in position 264 to 268 is any amino acid
  Variant (270)..(270): Xaa in position 270 is any amino acid
  Variant (274)..(274): Xaa in position 274 is any amino acid
  Variant (277)..(278): Xaa in position 277 to 278 is any amino acid
  Variant (280)..(282): Xaa in position 280 to 282 is any amino acid
  Variant (284)..(288): Xaa in position 284 to 288 is any amino acid
  Variant (290)..(291): Xaa in position 290 to 291 is any amino acid
  Variant (293)..(294): Xaa in position 293 to 294 is any amino acid
  Variant (297)..(300): Xaa in position 297 to 300 is any amino acid
  Variant (302)..(308): Xaa in position 302 to 308 is any amino acid
  Variant (310)..(311): Xaa in position 310 to 311 is any amino acid
  Variant (312)..(312): Xaa in position 312 is any or no amino acid
  Variant (314)..(314): Xaa in position 314 is any amino acid
  Variant (316)..(317): Xaa in position 316 to 317 is any amino acid
  Variant (319)..(322): Xaa in position 319 to 322 is any amino acid
  Variant (324)..(327): Xaa in position 324 to 327 is any amino acid
  Variant (329)..(331): Xaa in position 329 to 331 is any amino acid

SEQ ID NO: 4466 - protein, 55 aa, Artificial sequence; identical to SEQ ID NO: 1765
  protein pattern
  Variant (2)..(5): Xaa in position 2 to 5 is any amino acid
  Variant (6)..(7): Xaa in position 6 to 7 is any or no amino acid
  Variant (9)..(9): Xaa in position 9 is any amino acid
  Variant (12)..(12): Xaa in position 12 is any amino acid
  Variant (16)..(16): Xaa in position 16 is any amino acid
  Variant (17)..(17): Xaa in position 17 is Ile or Leu
  Variant (19)..(20): Xaa in position 19 to 20 is any amino acid
  Variant (21)..(21): Xaa in position 21 is Asp, Glu or Arg
  Variant (22)..(22): Xaa in position 22 is Phe or Tyr
  Variant (23)..(23): Xaa in position 23 is Asp, Glu, Lys or Arg
  Variant (24)..(24): Xaa in position 24 is Glu or Gln
  Variant (26)..(28): Xaa in position 26 to 28 is any amino acid
  Variant (30)..(30): Xaa in position 30 is Asn, Ser or Thr
  Variant (31)..(31): Xaa in position 31 is any amino acid
  Variant (34)..(35): Xaa in position 34 to 35 is any amino acid
  Variant (36)..(36): Xaa in position 36 is Asp or Glu
  Variant (37)..(37): Xaa in position 37 is Glu or Ser
  Variant (38)..(38): Xaa in position 38 is any amino acid
  Variant (40)..(40): Xaa in position 40 is Ala, Pro or Val
  Variant (44)..(44): Xaa in position 44 is Phe or Tyr
  Variant (47)..(47): Xaa in position 47 is Ala, Gly or Thr
  Variant (48)..(48): Xaa in position 48 is any amino acid
  Variant (50)..(52): Xaa in position 50 to 52 is any amino acid
  Variant (54)..(54): Xaa in position 54 is Ala, Gly or Val
  Variant (55)..(55): Xaa in position 55 is Asp or Gln

SEQ ID NO: 4467 - protein, 58 aa, Artificial sequence; identical to SEQ ID NO: 1766
  protein pattern
  Variant (2)..(3): Xaa in position 2 to 3 is any amino acid
  Variant (4)..(4): Xaa in position 4 is any or no amino acid
  Variant (6)..(6): Xaa in position 6 is any or no amino acid
  Variant (8)..(8): Xaa in position 8 is Leu or Met
  Variant (9)..(9): Xaa in position 9 is Asp, Asn or Thr
  Variant (10)..(10): Xaa in position 10 is Asn, Thr or Val
  Variant (11)..(11): Xaa in position 11 is Glu, Pro, Gln or Ser
  Variant (13)..(13): Xaa in position 13 is Lys or Arg
  Variant (15)..(15): Xaa in position 15 is Ala, Glu or Gly
  Variant (18)..(18): Xaa in position 18 is Asp or Gly
  Variant (19)..(19): Xaa in position 19 is any amino acid
  Variant (20)..(20): Xaa in position 20 is Lys or Arg
  Variant (22)..(22): Xaa in position 22 is any amino acid
  Variant (23)..(23): Xaa in position 23 is Asp or Glu
  Variant (26)..(26): Xaa in position 26 is Ala, Asp, Glu, Asn, Ser or Thr
  Variant (27)..(27): Xaa in position 27 is any amino acid
  Variant (28)..(28): Xaa in position 28 is Phe or Tyr
  Variant (29)..(31): Xaa in position 29 to 31 is any amino acid
  Variant (33)..(33): Xaa in position 33 is any amino acid
  Variant (34)..(34): Xaa in position 34 is Ala or Glu
  Variant (35)..(35): Xaa in position 35 is any amino acid
  Variant (37)..(38): Xaa in position 37 to 38 is any amino acid
  Variant (39)..(39): Xaa in position 39 is Gln or Arg
  Variant (42)..(42): Xaa in position 42 is any amino acid
  Variant (43)..(43): Xaa in position 43 is Ala or Gly
  Variant (44)..(44): Xaa in position 44 is Ala, Ile or Val
  Variant (45)..(46): Xaa in position 45 to 46 is any amino acid
  Variant (47)..(47): Xaa in position 47 is Ile, Met or Val
  Variant (48)..(48): Xaa in position 48 is Glu or Gly
  Variant (49)..(49): Xaa in position 49 is any amino acid
  Variant (51)..(52): Xaa in position 51 to 52 is any amino acid
  Variant (54)..(54): Xaa in position 54 is Asp, Gln or Ser
  Variant (55)..(56): Xaa in position 55 to 56 is any amino acid
  Variant (57)..(57): Xaa in position 57 is Asp, Glu or Gly
  Variant (58)..(58): Xaa in position 58 is Lys or Arg

SEQ ID NO: 4468 - protein, 40 aa, Artificial sequence; identical to SEQ ID NO: 1767
  protein pattern
  Variant (2)..(2): Xaa in position 2 is any amino acid
  Variant (3)..(3): Xaa in position 3 is Ala, Gly or Val
  Variant (5)..(5): Xaa in position 5 is any or no amino acid
  Variant (7)..(9): Xaa in position 7 to 9 is any amino acid
  Variant (10)..(13): Xaa in position 10 to 13 is any or no amino acid
  Variant (15)..(15): Xaa in position 15 is Lys or Arg
  Variant (16)..(16): Xaa in position 16 is any amino acid
  Variant (19)..(19): Xaa in position 19 is any amino acid
  Variant (21)..(21): Xaa in position 21 is Ile, Leu or Val
  Variant (22)..(22): Xaa in position 22 is Phe, Leu or Val
  Variant (23)..(23): Xaa in position 23 is any amino acid
  Variant (24)..(24): Xaa in position 24 is Ile or Val
  Variant (25)..(25): Xaa in position 25 is Asp, Gly, Asn, Pro or Ser
  Variant (26)..(26): Xaa in position 26 is any amino acid
  Variant (27)..(27): Xaa in position 27 is Glu, Asn or Gln
  Variant (29)..(29): Xaa in position 29 is Ala or Gly
  Variant (32)..(32): Xaa in position 32 is any amino acid
  Variant (33)..(33): Xaa in position 33 is Ala, Glu, Ser or Thr
  Variant (35)..(35): Xaa in position 35 is Asn or Ser
  Variant (36)..(36): Xaa in position 36 is any amino acid
  Variant (37)..(37): Xaa in position 37 is Pro or Ser
  Variant (38)..(38): Xaa in position 38 is any amino acid
  Variant (39)..(39): Xaa in position 39 is Ile or Pro
  Variant (40)..(40): Xaa in position 40 is Asn or Pro

SEQ ID NO: 4469 - protein, 15 aa, Artificial sequence
  protein pattern
  Variant (3)..(3): Xaa in position 3 is any amino acid
  Variant (4)..(4): Xaa in position 4 is Ala or Ser
  Variant (5)..(5): Xaa in position 5 is Asp or Thr
  Variant (6)..(6): Xaa in position 6 is Ile, Leu or Val
  Variant (7)..(7): Xaa in position 7 is any amino acid
  Variant (12)..(12): Xaa in position 12 is Leu or Val
  Variant (13)..(13): Xaa in position 13 is Ile, Leu or Val
  Variant (14)..(14): Xaa in position 14 is Gly or Ser
PPXXXXXYEVEXXXF

SEQ ID NO: 4470 - protein, 18 aa, Artificial sequence
  protein pattern
  Variant (2)..(5): Xaa in position 2 to 5 is any amino acid
  Variant (6)..(6): Xaa in position 6 is Ala or Ser
  Variant (7)..(7): Xaa in position 7 is any amino acid
  Variant (8)..(8): Xaa in position 8 is Ala, Thr or Val
  Variant (9)..(10): Xaa in position 9 to 10 is any amino acid
  Variant (11)..(11): Xaa in position 11 is Ser or Thr
  Variant (12)..(12): Xaa in position 12 is any amino acid
  Variant (13)..(13): Xaa in position 13 is His or Lys
  Variant (15)..(15): Xaa in position 15 is any amino acid
  Variant (17)..(17): Xaa in position 17 is Asp or Lys
  Variant (18)..(18): Xaa in position 18 is Thr or Val
FXXXXXXXXXXXXKXEXX

SEQ ID NO: 4471 - protein, 23 aa, Artificial sequence
  protein pattern
  Variant (2)..(6): Xaa in position 2 to 6 is any or no amino acid
  Variant (8)..(8): Xaa in position 8 is Ile, Leu or Val
  Variant (10)..(12): Xaa in position 10 to 12 is any amino acid
  Variant (13)..(13): Xaa in position 13 is Ser or Val
  Variant (14)..(14): Xaa in position 14 is any amino acid
  Variant (16)..(16): Xaa in position 16 is Asp or Gln
  Variant (17)..(17): Xaa in position 17 is Ile or Val
  Variant (18)..(18): Xaa in position 18 is any amino acid
  Variant (20)..(20): Xaa in position 20 is Asp or Glu
  Variant (22)..(22): Xaa in position 22 is any amino acid
  Variant (23)..(23): Xaa in position 23 is Gly, Ile, Leu or Val
VXXXXXEXLXXXXXKXXXKXGXX

SEQ ID NO: 4472 - protein, 16 aa, Artificial sequence
  protein pattern
  Variant (2)..(2): Xaa in position 2 is any or no amino acid
  Variant (4)..(4): Xaa in position 4 is Phe, Ile or Val
  Variant (5)..(5): Xaa in position 5 is any amino acid
  Variant (7)..(7): Xaa in position 7 is Ala or Val
  Variant (8)..(8): Xaa in position 8 is any amino acid
  Variant (9)..(9): Xaa in position 9 is Glu, Lys or Arg
  Variant (10)..(10): Xaa in position 10 is any amino acid
  Variant (11)..(11): Xaa in position 11 is Ala, Asp or Ser
  Variant (13)..(15): Xaa in position 13 to 15 is any or no amino acid
EXDXXKXXXXXPXXXD

SEQ ID NO: 4473 - DNA, 1080 bp, Synechocystis sp.
  CDS (1)..(1080): transl_table=11
atggtggatgagtttgatctgcccccggaaatcattgaccgccgggtacggaagatgaaaatgatctccccttccaacatcgaggtcaacatcggtcagaccctcaaggacgacgaatatatcggcatgtgccgccgggaagtgctggatggttttctccgggaacggccggagaaactgggtacaaaagtcattaatggcaccgtttataaattagacattcctagcaaagatagtgatccctacaccctccactatgccgaccacagcgttggtggcaccactggggaaatgaaaatcctaaaagtagatgtggtgattggggctgatggcgctaactctcgcattgccaaagccattgacgctggggattacaactatgcgatcgccttccaagagcggattcgtctgccggaagacaaaatggcctactacgatgaactagcagaaatgtatgtgggcgatgacgtttctccggatttctacgcctgggtattcccaaaatatgaccacgtggcggtgggcaccggcaccatgaaggtgaacaaagcccgcatcaaagacttacaggctggcatccgcaccagggctgccaaaaaactagaaggcggagaaatcatcaaagtggaagcccatcccattcctgaacatccccggccccggcgggtggttggtcgagtagccctagtgggggatgccgctggtaccgtcaccaaatcctctggggaaggcatttactttgccgccaaatccgcccgtatgtgtgcggaaaccattgtggccaccagcaataatggccaacgggtgcccaccgaagccgatctgaaacaatacatcaaacaatgggataaacgctacggcgctacctatttggtgttggatattctgcaacgggtcttctatcgcaccgatgccaccagagaagcctttgtggaaatgtgttccgacatcgatgtgcaaaagctaacttttgacagttacctgtacaaaaccgtggtacccgccaatccattggtgcaaatgaaaattaccgccaaaaccattggtagcttgctccggggtaacgctttagccccttaa

SEQ ID NO: 4474 - protein, 359 aa, Synechocystis sp.
MVDEFDLPPEIIDRRVRKMKMISPSNIEVNIGQTLKDDEYIGMCRREVLDGFLRERPEKLGTKVINGTVYKLDIPSKDSDPYTLHYADHSVGGTTGEMKILKVDVVIGADGANSRIAKAIDAGDYNYAIAFQERIRLPEDKMAYYDELAEMYVGDDVSPDFYAWVFPKYDHVAVGTGTMKVNKARIKDLQAGIRTRAAKKLEGGEIIKVEAHPIPEHPRPRRVVGRVALVGDAAGTVTKSSGEGIYFAAKSARMCAETIVATSNNGQRVPTEADLKQYIKQWDKRYGATYLVLDILQRVFYRTDATREAFVEMCSDIDVQKLTFDSYLYKTVVPANPLVQMKITAKTIGSLLRGNALAP

SEQ ID NO: 4475 - DNA, 1953 bp, Glycine max; identical to SEQ ID NO: 1774
  CDS (265)..(1653)
  misc_feature (1919)..(1919): n is a, g, c or t
  misc_feature (1950)..(1950): n is a, g, c or t

SEQ ID NO: 4476 - protein, 462 aa, Glycine max; identical to SEQ ID NO: 1775

SEQ ID NO: 4477 - DNA, 1796 bp, Glycine max; identical to SEQ ID NO: 1776
  CDS (43)..(1431)

SEQ ID NO: 4478 - protein, 462 aa, Glycine max; identical to SEQ ID NO: 1777

SEQ ID NO: 4479 - DNA, 1404 bp, Arabidopsis thaliana; identical to SEQ ID NO: 1778
  CDS (1)..(1404)

SEQ ID NO: 4480 - protein, 467 aa, Arabidopsis thaliana; identical to SEQ ID NO: 1779

SEQ ID NO: 4481 - DNA, 1221 bp, Nostoc sp. PCC 7120; identical to SEQ ID NO: 1780
  CDS (1)..(1221): transl_table=11

SEQ ID NO: 4482 - protein, 406 aa, Nostoc sp. PCC 7120; identical to SEQ ID NO: 1781

SEQ ID NO: 4483 - DNA, 1152 bp, Chlorobium tepidum TLS; identical to SEQ ID NO: 1782
  CDS (1)..(1152): transl_table=11

SEQ ID NO: 4484 - protein, 383 aa, Chlorobium tepidum TLS; identical to SEQ ID NO: 1783

SEQ ID NO: 4485 - DNA, 1209 bp, Thermosynechococcus elongatus BP-1; identical to SEQ ID NO: 1784
  CDS (1)..(1209): transl_table=11

SEQ ID NO: 4486 - protein, 402 aa, Thermosynechococcus elongatus BP-1; identical to SEQ ID NO: 1785

SEQ ID NO: 4487 - DNA, 1344 bp, Prochlorococcus marinus subsp. marinus str. CCMP1375; identical to SEQ ID NO: 1786
  CDS (1)..(1344): transl_table=11

SEQ ID NO: 4488 - protein, 447 aa, Prochlorococcus marinus subsp. marinus str. CCMP1375; identical to SEQ ID NO: 1787

SEQ ID NO: 4489 - DNA, 1332 bp, Prochlorococcus marinus subsp. pastoris str. CCMP1986; identical to SEQ ID NO: 1788
  CDS (1)..(1332): transl_table=11

SEQ ID NO: 4490 - protein, 443 aa, Prochlorococcus marinus subsp. pastoris str. CCMP1986; identical to SEQ ID NO: 1789

SEQ ID NO: 4491 - DNA, 1407 bp, Prochlorococcus marinus str. MIT 9313; identical to SEQ ID NO: 1790
  CDS (1)..(1407): transl_table=11

SEQ ID NO: 4492 - protein, 468 aa, Prochlorococcus marinus str. MIT 9313; identical to SEQ ID NO: 1791

SEQ ID NO: 4493 - DNA, 1353 bp, Synechococcus sp. WH 8102; identical to SEQ ID NO: 1792
  CDS (1)..(1353): transl_table=11

SEQ ID NO: 4494 - protein, 450 aa, Synechococcus sp. WH 8102; identical to SEQ ID NO: 1793

SEQ ID NO: 4495 - DNA, 1197 bp, Gloeobacter violaceus PCC 7421; identical to SEQ ID NO: 1794
  CDS (1)..(1197): transl_table=11

SEQ ID NO: 4496 - protein, 398 aa, Gloeobacter violaceus PCC 7421; identical to SEQ ID NO: 1795

SEQ ID NO: 4497 - DNA, 1206 bp, Rhodopseudomonas palustris CGA009; identical to SEQ ID NO: 1796
  CDS (1)..(1206): transl_table=11

SEQ ID NO: 4498 - protein, 401 aa, Rhodopseudomonas palustris CGA009; identical to SEQ ID NO: 1797

SEQ ID NO: 4499 - DNA, 1515 bp, Chlamydomonas reinhardtii; identical to SEQ ID NO: 1798
  CDS (1)..(1515)

SEQ ID NO: 4500 - protein, 504 aa, Chlamydomonas reinhardtii; identical to SEQ ID NO: 1799

SEQ ID NO: 4501 - DNA, 1569 bp, Physcomitrella patens subsp. patens; identical to SEQ ID NO: 1800
  CDS (1)..(1569)

SEQ ID NO: 4502 - protein, 522 aa, Physcomitrella patens subsp. patens; identical to SEQ ID NO: 1801

SEQ ID NO: 4503 - DNA, 1557 bp, Physcomitrella patens subsp. patens; identical to SEQ ID NO: 1802
  CDS (1)..(1557)

SEQ ID NO: 4504 - protein, 518 aa, Physcomitrella patens subsp. patens; identical to SEQ ID NO: 1803

SEQ ID NO: 4505 - DNA, 1575 bp, Physcomitrella patens subsp. patens; identical to SEQ ID NO: 1804
  CDS (1)..(1575)

SEQ ID NO: 4506 - protein, 524 aa, Physcomitrella patens subsp. patens; identical to SEQ ID NO: 1805

SEQ ID NO: 4507 - DNA, 1341 bp, Prochlorococcus marinus str. AS9601; identical to SEQ ID NO: 1806
  CDS (1)..(1341): transl_table=11

SEQ ID NO: 4508 - protein, 446 aa, Prochlorococcus marinus str. AS9601; identical to SEQ ID NO: 1807

SEQ ID NO: 4509 - DNA, 1338 bp, Prochlorococcus marinus str. MIT 9515; identical to SEQ ID NO: 1808
  CDS (1)..(1338): transl_table=11

SEQ ID NO: 4510 - protein, 445 aa, Prochlorococcus marinus str. MIT 9515; identical to SEQ ID NO: 1809

SEQ ID NO: 4511 - DNA, 1332 bp, Prochlorococcus marinus str. NATL1A; identical to SEQ ID NO: 1810
  CDS (1)..(1332): transl_table=11

SEQ ID NO: 4512 - protein, 443 aa, Prochlorococcus marinus str. NATL1A; identical to SEQ ID NO: 1811

SEQ ID NO: 4513 - DNA, 1407 bp, Prochlorococcus marinus str. MIT 9303; identical to SEQ ID NO: 1812
  CDS (1)..(1407): transl_table=11

SEQ ID NO: 4514 - protein, 468 aa, Prochlorococcus marinus str. MIT 9303; identical to SEQ ID NO: 1813

SEQ ID NO: 4515 - DNA, 1341 bp, Prochlorococcus marinus str. MIT 9301; identical to SEQ ID NO: 1814
  CDS (1)..(1341): transl_table=11

SEQ ID NO: 4516 - protein, 446 aa, Prochlorococcus marinus str. MIT 9301; identical to SEQ ID NO: 1815

SEQ ID NO: 4517 - DNA, 1206 bp, Bradyrhizobium sp. ORS278; identical to SEQ ID NO: 1816
  CDS (1)..(1206): transl_table=11

SEQ ID NO: 4518 - protein, 401 aa, Bradyrhizobium sp. ORS278; identical to SEQ ID NO: 1817

SEQ ID NO: 4519 - DNA, 1374 bp, Synechococcus sp. WH 7803; identical to SEQ ID NO: 1818
  CDS (1)..(1374): transl_table=11

SEQ ID NO: 4520 - protein, 457 aa, Synechococcus sp. WH 7803; identical to SEQ ID NO: 1819

SEQ ID NO: 4521 - DNA, 1335 bp, Prochlorococcus marinus str. MIT 9215; identical to SEQ ID NO: 1820
  CDS (1)..(1335): transl_table=11

SEQ ID NO: 4522 - protein, 444 aa, Prochlorococcus marinus str. MIT 9215; identical to SEQ ID NO: 1821

SEQ ID NO: 4523 - DNA, 1350 bp, Prochlorococcus marinus str. MIT 9211; identical to SEQ ID NO: 1822
  CDS (1)..(1350): transl_table=11

SEQ ID NO: 4524 - protein, 449 aa, Prochlorococcus marinus str. MIT 9211; identical to SEQ ID NO: 1823

SEQ ID NO: 4525 - DNA, 1224 bp, Synechococcus sp. PCC 7002; identical to SEQ ID NO: 1824
  CDS (1)..(1224): transl_table=11

SEQ ID NO: 4526 - protein, 407 aa, Synechococcus sp. PCC 7002; identical to SEQ ID NO: 1825

SEQ ID NO: 4527 - DNA, 1221 bp, Cyanothece sp. ATCC 51142; identical to SEQ ID NO: 1826
  CDS (1)..(1221): transl_table=11

SEQ ID NO: 4528 - protein, 406 aa, Cyanothece sp. ATCC 51142; identical to SEQ ID NO: 1827

SEQ ID NO: 4529 - DNA, 1221 bp, Nostoc punctiforme PCC 73102; identical to SEQ ID NO: 1828
  CDS (1)..(1221): transl_table=11

SEQ ID NO: 4530 - protein, 406 aa, Nostoc punctiforme PCC 73102; identical to SEQ ID NO: 1829

SEQ ID NO: 4531 - DNA, 1374 bp, Synechococcus elongatus PCC 6301; identical to SEQ ID NO: 1830
  CDS (1)..(1374): transl_table=11

SEQ ID NO: 4532 - protein, 457 aa, Synechococcus elongatus PCC 6301; identical to SEQ ID NO: 1831

SEQ ID NO: 4533 - DNA, 1188 bp, Thermococcus kodakarensis KOD1; identical to SEQ ID NO: 1832
  CDS (1)..(1188): transl_table=11

SEQ ID NO: 4534 - protein, 395 aa, Thermococcus kodakarensis KOD1; identical to SEQ ID NO: 1833

SEQ ID NO: 4535 - DNA, 1257 bp, Anabaena variabilis ATCC 29413; identical to SEQ ID NO: 1834
  CDS (1)..(1257): transl_table=11

SEQ ID NO: 4536 - protein, 418 aa, Anabaena variabilis ATCC 29413; identical to SEQ ID NO: 1835

SEQ ID NO: 4537 - DNA, 1368 bp, Synechococcus sp. CC9605; identical to SEQ ID NO: 1836
  CDS (1)..(1368): transl_table=11

SEQ ID NO: 4538 - protein, 455 aa, Synechococcus sp. CC9605; identical to SEQ ID NO: 1837

SEQ ID NO: 4539 - DNA, 1341 bp, Prochlorococcus marinus str. MIT 9312; identical to SEQ ID NO: 1838
  CDS (1)..(1341): transl_table=11

SEQ ID NO: 4540 - protein, 446 aa, Prochlorococcus marinus str. MIT 9312; identical to SEQ ID NO: 1839

SEQ ID NO: 4541 - DNA, 1242 bp, Rhodospirillum rubrum ATCC 11170; identical to SEQ ID NO: 1840
  CDS (1)..(1242): transl_table=11

SEQ ID NO: 4542 - protein, 413 aa, Rhodospirillum rubrum ATCC 11170; identical to SEQ ID NO: 1841

SEQ ID NO: 4543 - DNA, 1221 bp, Trichodesmium erythraeum IMS101; identical to SEQ ID NO: 1842
  CDS (1)..(1221): transl_table=11

SEQ ID NO: 4544 - protein, 406 aa, Trichodesmium erythraeum IMS101; identical to SEQ ID NO: 1843

SEQ ID NO: 4545 - DNA, 1389 bp, Synechococcus sp. CC9311; identical to SEQ ID NO: 1844
  CDS (1)..(1389): transl_table=11

SEQ ID NO: 4546 - protein, 462 aa, Synechococcus sp. CC9311; identical to SEQ ID NO: 1845

SEQ ID NO: 4547 - DNA, 1236 bp, Nostoc punctiforme PCC 73102; identical to SEQ ID NO: 1846
  CDS (1)..(1236): transl_table=11

SEQ ID NO: 4548 - protein, 411 aa, Nostoc punctiforme PCC 73102; identical to SEQ ID NO: 1847

SEQ ID NO: 4549 - DNA, 1242 bp, Crocosphaera watsonii WH 8501; identical to SEQ ID NO: 1848
  CDS (1)..(1242): transl_table=11

SEQ ID NO: 4550 - protein, 413 aa, Crocosphaera watsonii WH 8501; identical to SEQ ID NO: 1849

SEQ ID NO: 4551 - DNA, 1140 bp, Prosthecochloris aestuarii DSM 271; identical to SEQ ID NO: 1850
  CDS (1)..(1140): transl_table=11

SEQ ID NO: 4552 - protein, 379 aa, Prosthecochloris aestuarii DSM 271; identical to SEQ ID NO: 1851

SEQ ID NO: 4553 - DNA, 1209 bp, Erythrobacter sp. NAP1; identical to SEQ ID NO: 1852
  CDS (1)..(1209): transl_table=11

SEQ ID NO: 4554 - protein, 402 aa, Erythrobacter sp. NAP1; identical to SEQ ID NO: 1853

SEQ ID NO: 4555 - DNA, 1374 bp, Synechococcus sp. RS9917; identical to SEQ ID NO: 1854
  CDS (1)..(1374): transl_table=11

SEQ ID NO: 4556 - protein, 457 aa, Synechococcus sp. RS9917; identical to SEQ ID NO: 1855

SEQ ID NO: 4557 - DNA, 1392 bp, Synechococcus sp. WH 5701; identical to SEQ ID NO: 1856
  CDS (1)..(1392): transl_table=11

SEQ ID NO: 4558 - protein, 463 aa, Synechococcus sp. WH 5701; identical to SEQ ID NO: 1857

SEQ ID NO: 4559 - DNA, 1374 bp, Synechococcus sp. WH 7805; identical to SEQ ID NO: 1858
  CDS (1)..(1374): transl_table=11

SEQ ID NO: 4560 - protein, 457 aa, Synechococcus sp. WH 7805; identical to SEQ ID NO: 1859

SEQ ID NO: 4561 - DNA, 1356 bp, Synechococcus sp. RS9916; identical to SEQ ID NO: 1860
  CDS (1)..(1356): transl_table=11

SEQ ID NO: 4562 - protein, 451 aa, Synechococcus sp. RS9916; identical to SEQ ID NO: 1861

SEQ ID NO: 4563 - DNA, 1194 bp, marine gamma proteobacterium HTCC2080; identical to SEQ ID NO: 1862
  CDS (1)..(1194): transl_table=11

SEQ ID NO: 4564 - protein, 397 aa, marine gamma proteobacterium HTCC2080; identical to SEQ ID NO: 1863

SEQ ID NO: 4565 - DNA, 1218 bp, Cyanothece sp. PCC 8801; identical to SEQ ID NO: 1864
  CDS (1)..(1218): transl_table=11

SEQ ID NO: 4566 - protein, 405 aa, Cyanothece sp. PCC 8801; identical to SEQ ID NO: 1865

SEQ ID NO: 4567 - DNA, 1218 bp, Cyanothece sp. PCC 7424; identical to SEQ ID NO: 1866
  CDS (1)..(1218): transl_table=11

SEQ ID NO: 4568 - protein, 405 aa, Cyanothece sp. PCC 7424; identical to SEQ ID NO: 1867

SEQ ID NO: 4569 - DNA, 1344 bp, Vitis vinifera; identical to SEQ ID NO: 1868
  CDS (1)..(1344)
  misc_feature (267)..(267): m is a or c
  misc_feature (555)..(555): y is t or c
  misc_feature (567)..(567): y is t or c
  misc_feature (576)..(576): y is t or c
  misc_feature (624)..(624): y is t or c
  misc_feature (666)..(666): y is t or c

SEQ ID NO: 4570 - protein, 447 aa, Vitis vinifera; identical to SEQ ID NO: 1869
  misc_feature (89)..(89): The Xaa at location 89 stands for Asp, or Glu.

SEQ ID NO: 4571 - DNA, 1404 bp, Vitis vinifera; identical to SEQ ID NO: 1870
  CDS (1)..(1404)

SEQ ID NO: 4572 - protein, 467 aa, Vitis vinifera; identical to SEQ ID NO: 1871

SEQ ID NO: 4573 - DNA, 1401 bp, Vitis vinifera; identical to SEQ ID NO: 1872
  CDS (1)..(1401)

SEQ ID NO: 4574 - protein, 466 aa, Vitis vinifera; identical to SEQ ID NO: 1873

SEQ ID NO: 4575 - DNA, 1413 bp, Populus trichocarpa; identical to SEQ ID NO: 1874
  CDS (1)..(1413)

SEQ ID NO: 4576 - protein, 470 aa, Populus trichocarpa; identical to SEQ ID NO: 1875

SEQ ID NO: 4577 - DNA, 1401 bp, Mesembryanthemum crystallinum; identical to SEQ ID NO: 1876
  CDS (1)..(1401)

SEQ ID NO: 4578 - protein, 466 aa, Mesembryanthemum crystallinum; identical to SEQ ID NO: 1877

SEQ ID NO: 4579 - DNA, 1389 bp, Ostreococcus tauri; identical to SEQ ID NO: 1878
  CDS (1)..(1389)

SEQ ID NO: 4580 - protein, 462 aa, Ostreococcus tauri; identical to SEQ ID NO: 1879

SEQ ID NO: 4581 - DNA, 1401 bp, Brassica rapa subsp; identical to SEQ ID NO: 1880
  CDS (1)..(1401)

SEQ ID NO: 4582 - protein, 466 aa, Brassica rapa subsp; identical to SEQ ID NO: 1881

SEQ ID NO: 4583 - DNA, 1389 bp, Olea europaea; identical to SEQ ID NO: 1882
  CDS (1)..(1389)

SEQ ID NO: 4584 - protein, 462 aa, Olea europaea; identical to SEQ ID NO: 1883

SEQ ID NO: 4585 - DNA, 1206 bp, Thiocapsa roseopersicina; identical to SEQ ID NO: 1884
  CDS (1)..(1206): transl_table=11

SEQ ID NO: 4586 - protein, 401 aa, Thiocapsa roseopersicina; identical to SEQ ID NO: 1885

SEQ ID NO: 4587 - DNA, 1389 bp, Triticum aestivum; identical to SEQ ID NO: 1886
  CDS (1)..(1389)

SEQ ID NO: 4588 - protein, 462 aa, Triticum aestivum; identical to SEQ ID NO: 1887

SEQ ID NO: 4589 - DNA, 1389 bp, Lotus japonicus; identical to SEQ ID NO: 1888
  CDS (1)..(1389)

SEQ ID NO: 4590 - protein, 462 aa, Lotus japonicus; identical to SEQ ID NO: 1889

SEQ ID NO: 4591 - DNA, 1389 bp, Medicago truncatula; identical to SEQ ID NO: 1890
  CDS (1)..(1389)

SEQ ID NO: 4592 - protein, 462 aa, Medicago truncatula; identical to SEQ ID NO: 1891

SEQ ID NO: 4593 - DNA, 1206 bp, Bradyrhizobium sp; identical to SEQ ID NO: 1892
  CDS (1)..(1206): transl_table=11

SEQ ID NO: 4594 - protein, 401 aa, Bradyrhizobium sp; identical to SEQ ID NO: 1893

SEQ ID NO: 4595 - DNA, 1401 bp, Prunus persica; identical to SEQ ID NO: 1894
  CDS (1)..(1401)

SEQ ID NO: 4596 - protein, 466 aa, Prunus persica; identical to SEQ ID NO: 1895

SEQ ID NO: 4597 - DNA, 1404 bp, Arabidopsis thaliana; identical to SEQ ID NO: 1896
  CDS (1)..(1404)

SEQ ID NO: 4598 - protein, 467 aa, Arabidopsis thaliana; identical to SEQ ID NO: 1897

SEQ ID NO: 4599 - DNA, 1179 bp, Unknown; identical to SEQ ID NO: 1898
  uncultured proteobacterium
  CDS (1)..(1179): transl_table=11
  misc_feature (1149)..(1149): r is g or a
  misc_feature (1151)..(1151): m is a or c
  misc_feature (1152)..(1152): m is a or c

SEQ ID NO: 4600 - protein, 392 aa, Unknown; identical to SEQ ID NO: 1899
  uncultured proteobacterium
  misc_feature (384)..(384): The Xaa at location 384 stands for Asn, Lys, or Thr.

SEQ ID NO: 4601 - DNA, 1203 bp, Rhodocyclus gelatinosus; identical to SEQ ID NO: 1900
  CDS (1)..(1203): transl_table=11

SEQ ID NO: 4602 - protein, 400 aa, Rhodocyclus gelatinosus; identical to SEQ ID NO: 1901

SEQ ID NO: 4603 - DNA, 1389 bp, Glycine max; identical to SEQ ID NO: 1902
  CDS (1)..(1389)

SEQ ID NO: 4604 - protein, 462 aa, Glycine max; identical to SEQ ID NO: 1903

SEQ ID NO: 4605 - DNA, 1395 bp, Nicotiana tabacum; identical to SEQ ID NO: 1904
  CDS (1)..(1395)

SEQ ID NO: 4606 - protein, 464 aa, Nicotiana tabacum; identical to SEQ ID NO: 1905

SEQ ID NO: 4607 - DNA, 1176 bp, Rhodobacter capsulatus; identical to SEQ ID NO: 1906
  CDS (1)..(1176): transl_table=11

SEQ ID NO: 4608 - protein, 391 aa, Rhodobacter capsulatus; identical to SEQ ID NO: 1907

SEQ ID NO: 4609 - DNA, 1224 bp, Synechocystis sp; identical to SEQ ID NO: 1908
  CDS (1)..(1224): transl_table=11

SEQ ID NO: 4610 - protein, 407 aa, Synechocystis sp; identical to SEQ ID NO: 1909

SEQ ID NO: 4611 - DNA, 1374 bp, Oryza sativa; identical to SEQ ID NO: 1910
  CDS (1)..(1374)

SEQ ID NO: 4612 - protein, 457 aa, Oryza sativa; identical to SEQ ID NO: 1911

SEQ ID NO: 4613 - DNA, 1392 bp, Oryza sativa; identical to SEQ ID NO: 1912
  CDS (1)..(1392)

SEQ ID NO: 4614 - protein, 463 aa, Oryza sativa; identical to SEQ ID NO: 1913

SEQ ID NO: 4615 - DNA, 1720 bp, Zea mays; identical to SEQ ID NO: 1914
  CDS (142)..(1437)

SEQ ID NO: 4616 - protein, 431 aa, Zea mays; identical to SEQ ID NO: 1915

SEQ ID NO: 4617 - DNA, 1338 bp, Zea mays; identical to SEQ ID NO: 1916
  CDS (1)..(1338)

SEQ ID NO: 4618 - protein, 445 aa, Zea mays; identical to SEQ ID NO: 1917

SEQ ID NO: 4619 - DNA, 1389 bp, Glycine max; identical to SEQ ID NO: 1918
  CDS (1)..(1389)

SEQ ID NO: 4620 - protein, 462 aa, Glycine max; identical to SEQ ID NO: 1919

SEQ ID NO: 4621 - DNA, 1389 bp, Glycine max; identical to SEQ ID NO: 1920
  CDS (1)..(1389)

SEQ ID NO: 4622 - protein, 462 aa, Glycine max; identical to SEQ ID NO: 1921

SEQ ID NO: 4623 - DNA, 1374 bp, Zea mays; identical to SEQ ID NO: 1922
  CDS (1)..(1374)

SEQ ID NO: 4624 - protein, 457 aa, Zea mays; identical to SEQ ID NO: 1923

SEQ ID NO: 4625 - DNA, 21 bp, Artificial sequence
  primer
atggtggatgagtttgatctg

SEQ ID NO: 4626 - DNA, 20 bp, Artificial sequence
  primer
ttaaggggctaaagcgttac

SEQ ID NO: 4627 - protein, 431 aa, Artificial sequence; identical to SEQ ID NO: 1926
  consensus sequence
  Variant (2)..(2): Xaa in position 2 is any amino acid
  Variant (6)..(6): Xaa in position 6 is any amino acid
  Variant (11)..(11): Xaa in position 11 is any amino acid
  Variant (13)..(14): Xaa in position 13 to 14 is any amino acid
  Variant (18)..(18): Xaa in position 18 is any amino acid
  Variant (21)..(22): Xaa in position 21 to 22 is any amino acid
  Variant (24)..(25): Xaa in position 24 to 25 is any amino acid
  Variant (27)..(27): Xaa in position 27 is any amino acid
  Variant (29)..(29): Xaa in position 29 is any amino acid
  Variant (32)..(33): Xaa in position 32 to 33 is any amino acid
  Variant (34)..(34): Xaa in position 34 is any or no amino acid
  Variant (36)..(36): Xaa in position 36 is any amino acid
  Variant (39)..(40): Xaa in position 39 to 40 is any amino acid
  Variant (50)..(51): Xaa in position 50 to 51 is any amino acid
  Variant (54)..(55): Xaa in position 54 to 55 is any amino acid
  Variant (57)..(60): Xaa in position 57 to 60 is any amino acid
  Variant (61)..(62): Xaa in position 61 to 62 is any or no amino acid
  Variant (65)..(65): Xaa in position 65 is any amino acid
  Variant (67)..(68): Xaa in position 67 to 68 is any amino acid
  Variant (70)..(70): Xaa in position 70 is any amino acid
  Variant (77)..(78): Xaa in position 77 to 78 is any amino acid
  Variant (81)..(86): Xaa in position 81 to 86 is any amino acid
  Variant (87)..(94): Xaa in position 87 to 94 is any or no amino acid
  Variant (99)..(99): Xaa in position 99 is any amino acid
  Variant (104)..(104): Xaa in position 104 is any amino acid
  Variant (106)..(108): Xaa in position 106 to 108 is any amino acid
  Variant (110)..(110): Xaa in position 110 is any amino acid
  Variant (113)..(115): Xaa in position 113 to 115 is any amino acid
  Variant (118)..(121): Xaa in position 118 to 121 is any amino acid
  Variant (123)..(132): Xaa in position 123 to 132 is any amino acid
  Variant (133)..(140): Xaa in position 133 to 140 is any or no amino acid
  Variant (142)..(144): Xaa in position 142 to 144 is any amino acid
  Variant (146)..(153): Xaa in position 146 to 153 is any amino acid
  Variant (154)..(163): Xaa in position 154 to 163 is any or no amino acid
  Variant (166)..(166): Xaa in position 166 is any amino acid
  Variant (167)..(167): Xaa in position 167 is any or no amino acid
  Variant (180)..(182): Xaa in position 180 to 182 is any amino acid
  Variant (183)..(184): Xaa in position 183 to 184 is any or no amino acid
  Variant (187)..(187): Xaa in position 187 is any amino acid
  Variant (189)..(189): Xaa in position 189 is any amino acid
  Variant (190)..(190): Xaa in position 190 is any or no amino acid
  Variant (194)..(194): Xaa in position 194 is any amino acid
  Variant (198)..(200): Xaa in position 198 to 200 is any amino acid
  Variant (202)..(203): Xaa in position 202 to 203 is any amino acid
  Variant (204)..(204): Xaa in position 204 is any or no amino acid
  Variant (206)..(206): Xaa in position 206 is any amino acid
  Variant (208)..(208): Xaa in position 208 is any amino acid
  Variant (209)..(219): Xaa in position 209 to 219 is any or no amino acid
  Variant (221)..(223): Xaa in position 221 to 223 is any amino acid
  Variant (230)..(230): Xaa in position 230 is any amino acid
  Variant (238)..(238): Xaa in position 238 is any amino acid
  Variant (244)..(244): Xaa in position 244 is any amino acid
  Variant (245)..(245): Xaa in position 245 is any or no amino acid
  Variant (255)..(258): Xaa in position 255 to 258 is any amino acid
  Variant (259)..(261): Xaa in position 259 to 261 is any or no amino acid
  Variant (264)..(265): Xaa in position 264 to 265 is any amino acid
  Variant (267)..(269): Xaa in position 267 to 269 is any amino acid
  Variant (271)..(271): Xaa in position 271 is any amino acid
  Variant (274)..(276): Xaa in position 274 to 276 is any amino acid
  Variant (277)..(279): Xaa in position 277 to 279 is any or no amino acid
  Variant (281)..(282): Xaa in position 281 to 282 is any amino acid
  Variant (284)..(284): Xaa in position 284 is any amino acid
  Variant (299)..(300): Xaa in position 299 to 300 is any amino acid
  Variant (303)..(304): Xaa in position 303 to 304 is any amino acid
  Variant (305)..(305): Xaa in position 305 is any or no amino acid
  Variant (313)..(313): Xaa in position 313 is any amino acid
  Variant (317)..(317): Xaa in position 317 is any amino acid
  Variant (332)..(332): Xaa in position 332 is any amino acid
  Variant (335)..(335): Xaa in position 335 is any amino acid
  Variant (337)..(341): Xaa in position 337 to 341 is any amino acid
  Variant (342)..(342): Xaa in position 342 is any or no amino acid
  Variant (344)..(347): Xaa in position 344 to 347 is any amino acid
  Variant (348)..(348): Xaa in position 348 is any or no amino acid
  Variant (350)..(353): Xaa in position 350 to 353 is any amino acid
  Variant (354)..(355): Xaa in position 354 to 355 is any or no amino acid
  Variant (357)..(358): Xaa in position 357 to 358 is any amino acid
  Variant (359)..(360): Xaa in position 359 to 360 is any or no amino acid
  Variant (362)..(363): Xaa in position 362 to 363 is any amino acid
  Variant (365)..(366): Xaa in position 365 to 366 is any amino acid
  Variant (369)..(369): Xaa in position 369 is any amino acid
  Variant (372)..(373): Xaa in position 372 to 373 is any amino acid
  Variant (376)..(377): Xaa in position 376 to 377 is any amino acid
  Variant (380)..(384): Xaa in position 380 to 384 is any amino acid
  Variant (393)..(393): Xaa in position 393 is any amino acid
  Variant (395)..(396): Xaa in position 395 to 396 is any amino acid
  Variant (399)..(400): Xaa in position 399 to 400 is any amino acid
  Variant (409)..(409): Xaa in position 409 is any amino acid
  Variant (412)..(414): Xaa in position 412 to 414 is any amino acid
  Variant (416)..(419): Xaa in position 416 to 419 is any amino acid
  Variant (421)..(424): Xaa in position 421 to 424 is any amino acid
  Variant (426)..(430): Xaa in position 426 to 430 is any amino acid

SEQ ID NO: 4628 - protein, 34 aa, Artificial sequence; identical to SEQ ID NO: 1927
  protein pattern
  Variant (2)..(4): Xaa in position 2 to 4 is any or no amino acid
  Variant (10)..(10): Xaa in position 10 is any amino acid
  Variant (14)..(14): Xaa in position 14 is Cys or Ser
  Variant (19)..(19): Xaa in position 19 is Phe or Ile
  Variant (23)..(23): Xaa in position 23 is Ala or Pro
  Variant (25)..(25): Xaa in position 25 is any amino acid
  Variant (26)..(26): Xaa in position 26 is Ala, Gly or Ile
  Variant (27)..(27): Xaa in position 27 is Lys or Arg
  Variant (29)..(29): Xaa in position 29 is Ala or Cys
  Variant (31)..(31): Xaa in position 31 is Glu or Gln
  Variant (32)..(32): Xaa in position 32 is any amino acid
  Variant (33)..(33): Xaa in position 33 is Ile or Val
  Variant (34)..(34): Xaa in position 34 is Ile, Leu or Val

SEQ ID NO: 4629 - protein, 24 aa, Artificial sequence
  protein pattern
  Variant (3)..(3): Xaa in position 3 is Asp, Glu, Asn or Gln
  Variant (4)..(4): Xaa in position 4 is Asp, Glu or Asn
  Variant (5)..(5): Xaa in position 5 is any amino acid
  Variant (12)..(12): Xaa in position 12 is any amino acid
  Variant (16)..(16): Xaa in position 16 is Pro or Thr
  Variant (20)..(20): Xaa in position 20 is Ala or Gly
YYXXXAEMYVGXDVSXDFYXWVFP

SEQ ID NO: 4630 - protein, 26 aa, Artificial sequence
  protein pattern
  Variant (2)..(2): Xaa in position 2 is any or no amino acid
  Variant (6)..(6): Xaa in position 6 is Phe or Leu
  Variant (8)..(8): Xaa in position 8 is Ala or Glu
  Variant (9)..(9): Xaa in position 9 is Leu or Met
  Variant (11)..(11): Xaa in position 11 is Ala, Asp, Glu, Gly, Asn or Ser
  Variant (13)..(14): Xaa in position 13 to 14 is any amino acid
  Variant (17)..(17): Xaa in position 17 is Lys or Arg
  Variant (18)..(18): Xaa in position 18 is any amino acid
  Variant (21)..(21): Xaa in position 21 is Asp or Glu
  Variant (25)..(25): Xaa in position 25 is His or Tyr
AXREAXVXXCXDXXVQXXTFXSYLXK

SEQ ID NO: 4631 - protein, 14 aa, Artificial sequence
  protein pattern
  Variant (13)..(13): Xaa in position 13 is any or no amino acid
VEAHPIPEHPRPXR

SEQ ID NO: 4632 - protein, 20 aa, Artificial sequence
  protein pattern
  Variant (2)..(2): Xaa in position 2 is any or no amino acid
  Variant (4)..(4): Xaa in position 4 is any or no amino acid
  Variant (6)..(7): Xaa in position 6 to 7 is any amino acid
  Variant (9)..(9): Xaa in position 9 is any amino acid
  Variant (10)..(10): Xaa in position 10 is Ile or Met
  Variant (12)..(12): Xaa in position 12 is Ala or Ser
  Variant (16)..(16): Xaa in position 16 is any amino acid
  Variant (17)..(17): Xaa in position 17 is Ala, Glu or Thr
  Variant (19)..(19): Xaa in position 19 is Asp or Asn
  Variant (20)..(20): Xaa in position 20 is Phe, Ile or Val
DXRXVXXMXXIXPSNXXVXX

SEQ ID NO: 4633 - protein, 14 aa, Artificial sequence
  protein pattern
  Variant (2)..(2): Xaa in position 2 is Ala, Gly or Pro
  Variant (4)..(4): Xaa in position 4 is any amino acid
  Variant (9)..(9): Xaa in position 9 is Phe, Leu or Met
  Variant (11)..(11): Xaa in position 11 is Ala, Asp, Glu, Gly, Gln or Ser
  Variant (12)..(12): Xaa in position 12 is Phe or Tyr
  Variant (13)..(13): Xaa in position 13 is Leu or Met
IXMXRREVXDXXXR

SEQ ID NO: 4634 - protein, 14 aa, Artificial sequence
  protein pattern
  Variant (2)..(2): Xaa in position 2 is any amino acid
  Variant (3)..(3): Xaa in position 3 is Ile, Leu or Val
  Variant (4)..(4): Xaa in position 4 is Ile or Val
  Variant (10)..(10): Xaa in position 10 is Asn or Thr
  Variant (13)..(13): Xaa in position 13 is Ile or Val
DXXXGADGAXSRXA

SEQ ID NO: 4635 - protein, 14 aa, Artificial sequence
  protein pattern
  Variant (2)..(3): Xaa in position 2 to 3 is any or no amino acid
  Variant (6)..(7): Xaa in position 6 to 7 is any or no amino acid
  Variant (11)..(11): Xaa in position 11 is Ile or Val
  Variant (12)..(12): Xaa in position 12 is Glu, Lys or Arg
  Variant (13)..(13): Xaa in position 13 is Ile or Leu
YXXAIXXQERXXXP

SEQ ID NO: 4636 - protein, 14 aa, Artificial sequence
  protein pattern
  Variant (2)..(2): Xaa in position 2 is Phe or Tyr
  Variant (3)..(4): Xaa in position 3 to 4 is any amino acid
  Variant (6)..(6): Xaa in position 6 is Asp, Glu, Gly or Ser
  Variant (7)..(7): Xaa in position 7 is Ile, Leu or Val
  Variant (10)..(10): Xaa in position 10 is any amino acid
  Variant (11)..(11): Xaa in position 11 is any or no amino acid
  Variant (13)..(13): Xaa in position 13 is any or no amino acid
TXXXLXXLQXXFXY

SEQ ID NO: 4637 - protein, 10 aa, Artificial sequence
  protein pattern
  Variant (4)..(4): Xaa in position 4 is Ala or Pro
  Variant (5)..(5): Xaa in position 5 is Ala or Val
  Variant (10)..(10): Xaa in position 10 is Met or Val
DHVXXGTGTX

SEQ ID NO: 4638 - protein, 17 aa, Artificial sequence
  protein pattern
  Variant (2)..(3): Xaa in position 2 to 3 is any amino acid
  Variant (4)..(4): Xaa in position 4 is Asp or Gln
  Variant (5)..(5): Xaa in position 5 is any amino acid
  Variant (6)..(6): Xaa in position 6 is Lys or Arg
  Variant (7)..(7): Xaa in position 7 is Ile or Leu
  Variant (8)..(10): Xaa in position 8 to 10 is any amino acid
  Variant (12)..(12): Xaa in position 12 is Ala, Ile, Leu or Val
  Variant (13)..(13): Xaa in position 13 is Ala, Asp, Gly or Ser
  Variant (14)..(14): Xaa in position 14 is Ala or Ser
  Variant (15)..(15): Xaa in position 15 is Ile, Leu, Met or Val
  Variant (16)..(16): Xaa in position 16 is any amino acid
PXXXXXXXXXTXXXXXR

SEQ ID NO: 4639 - DNA, 1524 bp, Synechocystis sp.
  CDS (1)..(1524): transl_table=11
atggtccctagcaatgctgaatctcaatccgtagttgtaattggtgctggcattggtggtctgacaacggcggccctgttagcccaacagggttatcgagtcaaagtttatgaacaggcggccatagtggggggttgtgcatccacctttcggcgacggggttttattttcgatgtgggggccacccaggtggcgggcctagagccagggggaattcaccaccgcattttccgccagttgcaagtggatttgtcggaagcaaccctgtgcgatcccgcctgtgcagtttttttgccaggggaaaagcaaccgattaacgtttggcatgatcctgagcgatggcaaagggaaagggaacagcaatttccagggagtggcagattttggcagttgctacaaacgttgttccaaattagttggcgtttccaggggcgagatcctgtattgcccccccgcagtatgtgggatttgggccagttgttgggggcattgcggccggataccctactcacggctccctttgtgcctctcacggtgggggataccctccgattattgggtttggggtcagaccaaaggttaaaaacttttcttgatttacagttaaaactctattcccaggtgggggctgatgagacagctttgttatacgccgctacggccttgagcgtttcccaagggccccagggtctatggcatctccagggcagtatgcaaaccctaggcgatcgcctggtggaagcgctgaaaaaccatggaggggaattattttgcagtcagcgagtagagcagatccattgtggccaaggctatgtagagggggtgacggtgcgggacgtaaggagcggagaagtacgtcaagaaaaagcccagcaggtggtggccaatttaacggtgcagaatttactccaagcactagatcaaccattacccggttatcaaaaaagagtgactaatttaccctcgggctcgggtgcttttgtcatctatttaggcgtcaaggaagatgccattcccccagactgtgctccccatctacagtttttgtacgatcaccaaggccccattggcgaaaataattctctctttgtcagtgttagtaaaccaggggatggccgggctccccggggctgtagaactgtaattgcttcttccttcaccgacgtggccccctggtggaatgcttcccgggaacaatatcaggctctcaaggaaagttacacaaccacggcgatctccagattgggagaatatttcaatttggatgaatccaccattgttcaccaagaaagtgccactccccgcacatttgaccgttacactgcccgggaccaaggcatcgtcggcggagtaggccagcgtttgaccacctttgggccctttggctttgctccccgtacccccattcgtaacctttggctagtgggggattccgtgcatccgggggaaggcaccgctggggtaagttacagcgccctcaccattgcccggcaaatttgtgccagtggagcaacaaactcctaa

SEQ ID NO: 4640 - protein, 507 aa, Synechocystis sp.
MVPSNAESQSVVVIGAGIGGLTTAALLAQQGYRVKVYEQAAIVGGCASTFRRRGFIFDVGATQVAGLEPGGIHHRIFRQLQVDLSEATLCDPACAVFLPGEKQPINVWHDPERWQREREQQFPGSGRFWQLLQTLFQISWRFQGRDPVLPPRSMWDLGQLLGALRPDTLLTAPFVPLTVGDTLRLLGLGSDQRLKTFLDLQLKLYSQVGADETALLYAATALSVSQGPQGLWHLQGSMQTLGDRLVEALKNHGGELFCSQRVEQIHCGQGYVEGVTVRDVRSGEVRQEKAQQVVANLTVQNLLQALDQPLPGYQKRVTNLPSGSGAFVIYLGVKEDAIPPDCAPHLQFLYDHQGPIGENNSLFVSVSKPGDGRAPRGCRTVIASSFTDVAPWWNASREQYQALKESYTTTAISRLGEYFNLDESTIVHQESATPRTFDRYTARDQGIVGGVGQRLTTFGPFGFAPRTPIRNLWLVGDSVHPGEGTAGVSYSALTIARQICASGATNS

SEQ ID NO: 4641 - DNA, 1512 bp, Nostoc sp. PCC 7120; identical to SEQ ID NO: 1940
  CDS (1)..(1512): transl_table=11

SEQ ID NO: 4642 - protein, 503 aa, Nostoc sp. PCC 7120; identical to SEQ ID NO: 1941

SEQ ID NO: 4643 - DNA, 1545 bp, Thermosynechococcus elongatus BP-1; identical to SEQ ID NO: 1942
  CDS (1)..(1545): transl_table=11

SEQ ID NO: 4644 - protein, 514 aa, Thermosynechococcus elongatus BP-1; identical to SEQ ID NO: 1943

SEQ ID NO: 4645 - DNA, 1500 bp, Prochlorococcus marinus subsp. marinus str. CCMP1375; identical to SEQ ID NO: 1944
  CDS (1)..(1500): transl_table=11

SEQ ID NO: 4646 - protein, 499 aa, Prochlorococcus marinus subsp. marinus str. CCMP1375; identical to SEQ ID NO: 1945

SEQ ID NO: 4647 - DNA, 1506 bp, Prochlorococcus marinus subsp. pastoris str. CCMP1986; identical to SEQ ID NO: 1946
  CDS (1)..(1506): transl_table=11

SEQ ID NO: 4648 - protein, 501 aa, Prochlorococcus marinus subsp. pastoris str. CCMP1986; identical to SEQ ID NO: 1947

SEQ ID NO: 4649 - DNA, 1512 bp, Prochlorococcus marinus str. MIT 9313; identical to SEQ ID NO: 1948
  CDS (1)..(1512): transl_table=11

SEQ ID NO: 4650 - protein, 503 aa, Prochlorococcus marinus str. MIT 9313; identical to SEQ ID NO: 1949

SEQ ID NO: 4651 - DNA, 1503 bp, Synechococcus sp. WH 8102; identical to SEQ ID NO: 1950
  CDS (1)..(1503): transl_table=11

SEQ ID NO: 4652 - protein, 500 aa, Synechococcus sp. WH 8102; identical to SEQ ID NO: 1951

SEQ ID NO: 4653 - DNA, 1524 bp, Gloeobacter violaceus PCC 7421; identical to SEQ ID NO: 1952
  CDS (1)..(1524): transl_table=11

SEQ ID NO: 4654 - protein, 507 aa, Gloeobacter violaceus PCC 7421; identical to SEQ ID NO: 1953

SEQ ID NO: 4655 - DNA, 1818 bp, Physcomitrella patens subsp. patens; identical to SEQ ID NO: 1954
  CDS (1)..(1818)

SEQ ID NO: 4656 - protein, 605 aa, Physcomitrella patens subsp. patens; identical to SEQ ID NO: 1955

SEQ ID NO: 4657 - DNA, 1506 bp, Prochlorococcus marinus str. AS9601; identical to SEQ ID NO: 1956
  CDS (1)..(1506): transl_table=11

SEQ ID NO: 4658 - protein, 501 aa, Prochlorococcus marinus str. AS9601; identical to SEQ ID NO: 1957

SEQ ID NO: 4659 - DNA, 1506 bp, Prochlorococcus marinus str. MIT 9515; identical to SEQ ID NO: 1958
  CDS (1)..(1506): transl_table=11

SEQ ID NO: 4660 - protein, 501 aa, Prochlorococcus marinus str. MIT 9515; identical to SEQ ID NO: 1959

SEQ ID NO: 4661 - DNA, 1518 bp, Prochlorococcus marinus str. NATL1A; identical to SEQ ID NO: 1960
  CDS (1)..(1518): transl_table=11

SEQ ID NO: 4662 - protein, 505 aa, Prochlorococcus marinus str. NATL1A; identical to SEQ ID NO: 1961

SEQ ID NO: 4663 - DNA, 1512 bp, Prochlorococcus marinus str. MIT 9303; identical to SEQ ID NO: 1962
  CDS (1)..(1512): transl_table=11

SEQ ID NO: 4664 - protein, 503 aa, Prochlorococcus marinus str. MIT 9303; identical to SEQ ID NO: 1963

SEQ ID NO: 4665 - DNA, 1506 bp, Prochlorococcus marinus str. MIT 9301; identical to SEQ ID NO: 1964
  CDS (1)..(1506): transl_table=11

SEQ ID NO: 4666 - protein, 501 aa, Prochlorococcus marinus str. MIT 9301; identical to SEQ ID NO: 1965

SEQ ID NO: 4667 - DNA, 1515 bp, Synechococcus sp. WH 7803; identical to SEQ ID NO: 1966
  CDS (1)..(1515): transl_table=11

SEQ ID NO: 4668 - protein, 504 aa, Synechococcus sp. WH 7803; identical to SEQ ID NO: 1967

SEQ ID NO: 4669 - DNA, 1506 bp, Prochlorococcus marinus str. MIT 9215; identical to SEQ ID NO: 1968
  CDS (1)..(1506): transl_table=11

SEQ ID NO: 4670 - protein, 501 aa, Prochlorococcus marinus str. MIT 9215; identical to SEQ ID NO: 1969

SEQ ID NO: 4671 - DNA, 1512 bp, Prochlorococcus marinus str. MIT 9211; identical to SEQ ID NO: 1970
  CDS (1)..(1512): transl_table=11

SEQ ID NO: 4672 - protein, 503 aa, Prochlorococcus marinus str. MIT 9211; identical to SEQ ID NO: 1971

SEQ ID NO: 4673 - DNA, 1500 bp, Synechococcus sp. PCC 7002; identical to SEQ ID NO: 1972
  CDS (1)..(1500): transl_table=11

SEQ ID NO: 4674 - protein, 499 aa, Synechococcus sp. PCC 7002; identical to SEQ ID NO: 1973

SEQ ID NO: 4675 - DNA, 1506 bp, Cyanothece sp. ATCC 51142; identical to SEQ ID NO: 1974
  CDS (1)..(1506): transl_table=11

SEQ ID NO: 4676 - protein, 501 aa, Cyanothece sp. ATCC 51142; identical to SEQ ID NO: 1975

SEQ ID NO: 4677 - DNA, 1515 bp, Nostoc punctiforme PCC 73102; identical to SEQ ID NO: 1976
  CDS (1)..(1515): transl_table=11

SEQ ID NO: 4678 - protein, 504 aa, Nostoc punctiforme PCC 73102; identical to SEQ ID NO: 1977

SEQ ID NO: 4679 - DNA, 1572 bp, Synechococcus elongatus PCC 6301; identical to SEQ ID NO: 1978
  CDS (1)..(1572): transl_table=11

SEQ ID NO: 4680 - protein, 523 aa, Synechococcus elongatus PCC 6301; identical to SEQ ID NO: 1979

SEQ ID NO: 4681 - DNA, 1518 bp, Prochlorococcus marinus str. NATL2A; identical to SEQ ID NO: 1980
  CDS (1)..(1518): transl_table=11

SEQ ID NO: 4682 - protein, 505 aa, Prochlorococcus marinus str. NATL2A; identical to SEQ ID NO: 1981

SEQ ID NO: 4683 - DNA, 1518 bp, Anabaena variabilis ATCC 29413; identical to SEQ ID NO: 1982
  CDS (1)..(1518): transl_table=11

SEQ ID NO: 4684 - protein, 505 aa, Anabaena variabilis ATCC 29413; identical to SEQ ID NO: 1983

SEQ ID NO: 4685 - DNA, 1503 bp, Synechococcus sp. CC9605; identical to SEQ ID NO: 1984
  CDS (1)..(1503): transl_table=11

SEQ ID NO: 4686 - protein, 500 aa, Synechococcus sp. CC9605; identical to SEQ ID NO: 1985

SEQ ID NO: 4687 - DNA, 1506 bp, Prochlorococcus marinus str. MIT 9312; identical to SEQ ID NO: 1986
  CDS (1)..(1506): transl_table=11

SEQ ID NO: 4688 - protein, 501 aa, Prochlorococcus marinus str. MIT 9312; identical to SEQ ID NO: 1987

SEQ ID NO: 4689 - DNA, 1554 bp, Trichodesmium erythraeum IMS101; identical to SEQ ID NO: 1988
  CDS (1)..(1554): transl_table=11

SEQ ID NO: 4690 - protein, 517 aa, Trichodesmium erythraeum IMS101; identical to SEQ ID NO: 1989

SEQ ID NO: 4691 - DNA, 1530 bp, Synechococcus sp. CC9311; identical to SEQ ID NO: 1990
  CDS (1)..(1530): transl_table=11

SEQ ID NO: 4692 - protein, 509 aa, Synechococcus sp. CC9311; identical to SEQ ID NO: 1991

SEQ ID NO: 4693 - DNA, 1506 bp, Crocosphaera watsonii WH 8501; identical to SEQ ID NO: 1992
  CDS (1)..(1506): transl_table=11

SEQ ID NO: 4694 - protein, 501 aa, Crocosphaera watsonii WH 8501; identical to SEQ ID NO: 1993

SEQ ID NO: 4695 - DNA, 1533 bp, Synechococcus sp. RS9917; identical to SEQ ID NO: 1994
  CDS (1)..(1533): transl_table=11

SEQ ID NO: 4696 - protein, 510 aa, Synechococcus sp. RS9917; identical to SEQ ID NO: 1995

SEQ ID NO: 4697 - DNA, 1554 bp, Synechococcus sp. WH 5701; identical to SEQ ID NO: 1996
  CDS (1)..(1554): transl_table=11

SEQ ID NO: 4698 - protein, 517 aa, Synechococcus sp. WH 5701; identical to SEQ ID NO: 1997

SEQ ID NO: 4699 - DNA, 1515 bp, Synechococcus sp. WH 7805; identical to SEQ ID NO: 1998
  CDS (1)..(1515): transl_table=11

SEQ ID NO: 4700 - protein, 504 aa, Synechococcus sp. WH 7805; identical to SEQ ID NO: 1999

SEQ ID NO: 4701 - DNA, 1734 bp, Synechococcus sp. RS9916; identical to SEQ ID NO: 2000
  CDS (1)..(1734): transl_table=11

SEQ ID NO: 4702 - protein, 577 aa, Synechococcus sp. RS9916; identical to SEQ ID NO: 2001

SEQ ID NO: 4703 - DNA, 1500 bp, Cyanothece sp. PCC 8801; identical to SEQ ID NO: 2002
  CDS (1)..(1500): transl_table=11

SEQ ID NO: 4704 - protein, 499 aa, Cyanothece sp. PCC 8801; identical to SEQ ID NO: 2003

SEQ ID NO: 4705 - DNA, 1533 bp, Cyanothece sp. PCC 7424; identical to SEQ ID NO: 2004
  CDS (1)..(1533): transl_table=11

SEQ ID NO: 4706 - protein, 510 aa, Cyanothece sp. PCC 7424; identical to SEQ ID NO: 2005

SEQ ID NO: 4707 - DNA, 1710 bp, Vitis vinifera; identical to SEQ ID NO: 2006
  CDS (1)..(1710)

SEQ ID NO: 4708 - protein, 569 aa, Vitis vinifera; identical to SEQ ID NO: 2007

SEQ ID NO: 4709 - DNA, 1560 bp, Microcystis aeruginosa PCC 7806; identical to SEQ ID NO: 2008
  CDS (1)..(1560): transl_table=11

SEQ ID NO: 4710 - protein, 519 aa, Microcystis aeruginosa PCC 7806; identical to SEQ ID NO: 2009

SEQ ID NO: 4711 - DNA, 1749 bp, Blakeslea trispora; identical to SEQ ID NO: 2010
  CDS (1)..(1749)

SEQ ID NO: 4712 - protein, 582 aa, Blakeslea trispora; identical to SEQ ID NO: 2011

SEQ ID NO: 4713 - DNA, 1749 bp, Blakeslea trispora; identical to SEQ ID NO: 2012
  CDS (1)..(1749)

SEQ ID NO: 4714 - protein, 582 aa, Blakeslea trispora; identical to SEQ ID NO: 2013

SEQ ID NO: 4715 - DNA, 1749 bp, Blakeslea trispora; identical to SEQ ID NO: 2014
  CDS (1)..(1749)

SEQ ID NO: 4716 - protein, 582 aa, Blakeslea trispora; identical to SEQ ID NO: 2015

SEQ ID NO: 4717 - DNA, 1713 bp, Gibberella fujikuroi; identical to SEQ ID NO: 2016
  CDS (1)..(1713)

SEQ ID NO: 4718 - protein, 570 aa, Gibberella fujikuroi; identical to SEQ ID NO: 2017

SEQ ID NO: 4719 - DNA, 1737 bp, Arabidopsis thaliana; identical to SEQ ID NO: 2018
  CDS (1)..(1737)

SEQ ID NO: 4720 - protein, 578 aa, Arabidopsis thaliana; identical to SEQ ID NO: 2019

SEQ ID NO: 4721 - DNA, 1740 bp, Mucor circinelloides f; identical to SEQ ID NO: 2020
  CDS (1)..(1740)

SEQ ID NO: 4722 - protein, 579 aa, Mucor circinelloides f; identical to SEQ ID NO: 2021

SEQ ID NO: 4723 - DNA, 1848 bp, Daucus carota; identical to SEQ ID NO: 2022
  CDS (1)..(1848)

SEQ ID NO: 4724 - protein, 615 aa, Daucus carota; identical to SEQ ID NO: 2023

SEQ ID NO: 4725 - DNA, 1848 bp, Solanum lycopersicum; identical to SEQ ID NO: 2024
  CDS (1)..(1848)

SEQ ID NO: 4726 - protein, 615 aa, Solanum lycopersicum; identical to SEQ ID NO: 2025

SEQ ID NO: 4727 - DNA, 1794 bp, Oryza sativa; identical to SEQ ID NO: 2026
  CDS (1)..(1794)

SEQ ID NO: 4728 - protein, 597 aa, Oryza sativa; identical to SEQ ID NO: 2027

SEQ ID NO: 4729 - DNA, 1761 bp, Oryza sativa; identical to SEQ ID NO: 2028
  CDS (1)..(1761)

SEQ ID NO: 4730 - protein, 586 aa, Oryza sativa; identical to SEQ ID NO: 2029

SEQ ID NO: 4731 - DNA, 1827 bp, Glycine max; identical to SEQ ID NO: 2030
  CDS (1)..(1827)

SEQ ID NO: 4732 - protein, 608 aa, Glycine max; identical to SEQ ID NO: 2031

SEQ ID NO: 4733 - DNA, 1764 bp, Zea mays; identical to SEQ ID NO: 2032
  CDS (1)..(1764)

SEQ ID NO: 4734 - protein, 587 aa, Zea mays; identical to SEQ ID NO: 2033

SEQ ID NO: 4735 - DNA, 23 bp, Artificial sequence
  primer
atggtccctagcaatgctgaatc

SEQ ID NO: 4736 - DNA, 20 bp, Artificial sequence
  primer
ttaggagtttgttgctccac

SEQ ID NO: 4737 - protein, 532 aa, Artificial sequence; identical to SEQ ID NO: 2036
  consensus sequence
  Variant (2)..(2): Xaa in position 2 is any amino acid
  Variant (4)..(4): Xaa in position 4 is any amino acid
  Variant (7)..(7): Xaa in position 7 is any amino acid
  Variant (10)..(12): Xaa in position 10 to 12 is any amino acid
  Variant (14)..(14): Xaa in position 14 is any amino acid
  Variant (17)..(18): Xaa in position 17 to 18 is any amino acid
  Variant (20)..(21): Xaa in position 20 to 21 is any amino acid
  Variant (23)..(25): Xaa in position 23 to 25 is any amino acid
  Variant (27)..(31): Xaa in position 27 to 31 is any amino acid
  Variant (34)..(39): Xaa in position 34 to 39 is any amino acid
  Variant (41)..(44): Xaa in position 41 to 44 is any amino acid
  Variant (49)..(53): Xaa in position 49 to 53 is any amino acid
  Variant (55)..(58): Xaa in position 55 to 58 is any amino acid
  Variant (60)..(78): Xaa in position 60 to 78 is any amino acid
  Variant (79)..(80): Xaa in position 79 to 80 is any or no amino acid
  Variant (83)..(85): Xaa in position 83 to 85 is any amino acid
  Variant (87)..(104): Xaa in position 87 to 104 is any amino acid
  Variant (105)..(106): Xaa in position 105 to 106 is any or no amino acid
  Variant (108)..(111): Xaa in position 108 to 111 is any amino acid
  Variant (114)..(126): Xaa in position 114 to 126 is any amino acid
  Variant (127)..(143): Xaa in position 127 to 143 is any or no amino acid
  Variant (145)..(163): Xaa in position 145 to 163 is any amino acid
  Variant (165)..(194): Xaa in position 165 to 194 is any amino acid
  Variant (195)..(199): Xaa in position 195 to 199 is any or no amino acid
  Variant (201)..(202): Xaa in position 201 to 202 is any amino acid
  Variant (204)..(209): Xaa in position 204 to 209 is any amino acid
  Variant (210)..(210): Xaa in position 210 is any or no amino acid
  Variant (213)..(218): Xaa in position 213 to 218 is any amino acid
  Variant (220)..(222): Xaa in position 220 to 222 is any amino acid
  Variant (224)..(227): Xaa in position 224 to 227 is any amino acid
  Variant (229)..(234): Xaa in position 229 to 234 is any amino acid
  Variant (235)..(236): Xaa in position 235 to 236 is any or no amino acid
  Variant (238)..(242): Xaa in position 238 to 242 is any amino acid
  Variant (244)..(251): Xaa in position 244 to 251 is any amino acid
  Variant (252)..(252): Xaa in position 252 is any or no amino acid
  Variant (254)..(259): Xaa in position 254 to 259 is any amino acid
  Variant (260)..(260): Xaa in position 260 is any or no amino acid
  Variant (262)..(269): Xaa in position 262 to 269 is any amino acid
  Variant (271)..(307): Xaa in position 271 to 307 is any amino acid
  Variant (308)..(310): Xaa in position 308 to 310 is any or no amino acid
  Variant (312)..(352): Xaa in position 312 to 352 is any amino acid
  Variant (353)..(362): Xaa in position 353 to 362 is any or no amino acid
  Variant (364)..(372): Xaa in position 364 to 372 is any amino acid
  Variant (373)..(379): Xaa in position 373 to 379 is any or no amino acid
  Variant (381)..(381): Xaa in position 381 is any amino acid
  Variant (383)..(383): Xaa in position 383 is any amino acid
  Variant (385)..(389): Xaa in position 385 to 389 is any amino acid
  Variant (391)..(392): Xaa in position 391 to 392 is any amino acid
  Variant (393)..(393): Xaa in position 393 is any or no amino acid
  Variant (396)..(396): Xaa in position 396 is any amino acid
  Variant (398)..(411): Xaa in position 398 to 411 is any amino acid
  Variant (412)..(420): Xaa in position 412 to 420 is any or no amino acid
  Variant (422)..(425): Xaa in position 422 to 425 is any amino acid
  Variant (426)..(435): Xaa in position 426 to 435 is any or no amino acid
  Variant (437)..(439): Xaa in position 437 to 439 is any amino acid
  Variant (441)..(465): Xaa in position 441 to 465 is any amino acid
  Variant (466)..(467): Xaa in position 466 to 467 is any or no amino acid
  Variant (469)..(470): Xaa in position 469 to 470 is any amino acid
  Variant (473)..(480): Xaa in position 473 to 480 is any amino acid
  Variant (482)..(483): Xaa in position 482 to 483 is any amino acid
  Variant (485)..(486): Xaa in position 485 to 486 is any amino acid
  Variant (489)..(495): Xaa in position 489 to 495 is any amino acid
  Variant (496)..(498): Xaa in position 496 to 498 is any or no amino acid
  Variant (500)..(504): Xaa in position 500 to 504 is any amino acid
  Variant (506)..(509): Xaa in position 506 to 509 is any amino acid
  Variant (510)..(512): Xaa in position 510 to 512 is any or no amino acid
  Variant (514)..(516): Xaa in position 514 to 516 is any amino acid
  Variant (520)..(521): Xaa in position 520 to 521 is any amino acid
  Variant (524)..(524): Xaa in position 524 is any amino acid
  Variant (526)..(528): Xaa in position 526 to 528 is any amino acid
  Variant (530)..(531): Xaa in position 530 to 531 is any amino acid

SEQ ID NO: 4738 - protein, 54 aa, Artificial sequence; identical to SEQ ID NO: 2037
  protein pattern
  Variant (2)..(3): Xaa in position 2 to 3 is any amino acid
  Variant (5)..(5): Xaa in position 5 is Ala or Gly
  Variant (8)..(8): Xaa in position 8 is Thr or Val
  Variant (9)..(10): Xaa in position 9 to 10 is Ala, Gly, Ser or Thr
  Variant (11)..(11): Xaa in position 11 is Ala or Thr
  Variant (12)..(12): Xaa in position 12 is any amino acid
  Variant (14)..(14): Xaa in position 14 is Ala or Ser
  Variant (15)..(16): Xaa in position 15 to 16 is any amino acid
  Variant (18)..(19): Xaa in position 18 to 19 is any amino acid
  Variant (21)..(21): Xaa in position 21 is any amino acid
  Variant (22)..(22): Xaa in position 22 is Ile, Leu or Val
  Variant (23)..(23): Xaa in position 23 is any amino acid
  Variant (24)..(24): Xaa in position 24 is Asp or Glu
  Variant (25)..(29): Xaa in position 25 to 29 is any amino acid
  Variant (32)..(32): Xaa in position 32 is Cys or Ser
  Variant (33)..(33): Xaa in position 33 is Ala or Ser
  Variant (34)..(34): Xaa in position 34 is Gly or Ser
  Variant (35)..(35): Xaa in position 35 is any amino acid
  Variant (36)..(36): Xaa in position 36 is Phe or Tyr
  Variant (37)..(37): Xaa in position 37 is any amino acid
  Variant (39)..(40): Xaa in position 39 to 40 is any amino acid
  Variant (41)..(41): Xaa in position 41 is Phe, Trp or Tyr
  Variant (42)..(42): Xaa in position 42 is any amino acid
  Variant (47)..(47): Xaa in position 47 is Ala or Ser
  Variant (48)..(48): Xaa in position 48 is Ser or Thr
  Variant (49)..(49): Xaa in position 49 is any amino acid
  Variant (50)..(50): Xaa in position 50 is Ile, Met or Val
  Variant (51)..(51): Xaa in position 51 is any amino acid
  Variant (53)..(53): Xaa in position 53 is Phe or Leu
  Variant (54)..(54): Xaa in position 54 is Glu or Ser

SEQ ID NO: 4739 - protein, 22 aa, Artificial sequence
  protein pattern
  Variant (2)..(6): Xaa in position 2 to 6 is any or no amino acid
  Variant (9)..(9): Xaa in position 9 is any amino acid
  Variant (10)..(10): Xaa in position 10 is Phe, His or Tyr
  Variant (13)..(13): Xaa in position 13 is Glu or Gln
  Variant (15)..(15): Xaa in position 15 is Thr or Val
  Variant (16)..(16): Xaa in position 16 is Ala or Ile
  Variant (17)..(17): Xaa in position 17 is Ala or Gly
  Variant (19)..(19): Xaa in position 19 is Ala, Ser or Thr
  Variant (20)..(20): Xaa in position 20 is any amino acid
  Variant (22)..(22): Xaa in position 22 is Ala, Gly or Ser
GXXXXXDSXXPGXGXXXVXXSX

SEQ ID NO: 4740 - protein, 21 aa, Artificial sequence
  protein pattern
  Variant (2)..(2): Xaa in position 2 is any amino acid
  Variant (3)..(3): Xaa in position 3 is Ala, Gly or Ser
  Variant (6)..(6): Xaa in position 6 is any amino acid
  Variant (7)..(7): Xaa in position 7 is Ala, Gly, Ser or Thr
  Variant (8)..(8): Xaa in position 8 is Phe or His
  Variant (9)..(10): Xaa in position 9 to 10 is any amino acid
  Variant (11)..(11): Xaa in position 11 is Phe, Trp or Tyr
  Variant (12)..(13): Xaa in position 12 to 13 is any amino acid
  Variant (15)..(16): Xaa in position 15 to 16 is any amino acid
  Variant (18)..(19): Xaa in position 18 to 19 is any amino acid
  Variant (21)..(21): Xaa in position 21 is Gly or Pro
EXXTPXXXXXXXXRXXGXXGX

SEQ ID NO: 4741 - protein, 21 aa, Artificial sequence
  protein pattern
  Variant (2)..(2): Xaa in position 2 is Ala or Val
  Variant (4)..(5): Xaa in position 4 to 5 is any amino acid
  Variant (6)..(6): Xaa in position 6 is Ala, Cys, Gly, Ser, Thr or Val
  Variant (7)..(8): Xaa in position 7 to 8 is any amino acid
  Variant (10)..(10): Xaa in position 10 is any amino acid
  Variant (12)..(14): Xaa in position 12 to 14 is any or no amino acid
  Variant (16)..(16): Xaa in position 16 is any or no amino acid
  Variant (18)..(18): Xaa in position 18 is Ala, Gly, Ile or Leu
  Variant (19)..(20): Xaa in position 19 to 20 is any amino acid
  Variant (21)..(21): Xaa in position 21 is Pro, Gln, Ser or Thr
TXLXXXXXPXGXXXLXHXXXX

SEQ ID NO: 4742 - protein, 14 aa, Artificial sequence
  protein pattern
  Variant (2)..(3): Xaa in position 2 to 3 is any amino acid
  Variant (5)..(5): Xaa in position 5 is Ile or Leu
  Variant (6)..(6): Xaa in position 6 is Asp or Asn
  Variant (7)..(7): Xaa in position 7 is any amino acid
  Variant (8)..(8): Xaa in position 8 is Glu or Gln
  Variant (9)..(10): Xaa in position 9 to 10 is any amino acid
  Variant (11)..(11): Xaa in position 11 is Ile or Leu
  Variant (12)..(12): Xaa in position 12 is any amino acid
  Variant (14)..(14): Xaa in position 14 is Gln or Thr
LXXFXXXXXXXXSX

SEQ ID NO: 4743 - DNA, 1899 bp, Saccharomyces cerevisiae
  CDS (1)..(1899)
atgaattcacaaaaggcgagtaaaatgactggctcactaaaaaagaatgatctttatatttttgatttgtctgagcaacttctgaattcattgaaattgatgagctttgactccacactgcgagaagttgaagtagagaagacatctgataatgatagaaacaaggagtctggagatctccaaatagcaagaaagaaggtcacatcaaatgttatgcgttgtagtgtttgtcaaatgagctttgattccagaaatgaacaaaaggcccactaccagactgattatcatttgatgaatgttaagcgtaaccttagggggctggatatcctatccgttgaggaattcgatgcgctgatttctaaggagcatggtatcaagtctgaagacgaaaattctggcggcgagcaaacttcaagcgatcacgaagaaagtgaggaagccagcgatcgggacccggacctacaaactaataattatatggaaactataatcgaaaatgatttgcagaaattagggttccaaaaagacgagtcggatgctattagccatattaatacccaatcgccctacatttatttcaaatcgaagtatcttcaaaagaatgaggtcttggcgatttataagtctctatttaataaaaggagtctttccaaccccaatgaagctttgactttttggaattcgcaagagaacccaatggccatttcagctctgtttatggtgggaggtggacattttgcgggagcaattgtttctcatcaaagactcaatgtcaaggggaacgcgcacaagaaggacgaaaccttaattgagcaagcggtcaatttcttagagcacaagacgtttcacaggtatactaccagaaggaagcaaggtggttctcagtcagcaatggacaatgcaaagggaaaagctaactctgccggttcagcacttcgtaggtacaatgaaagcgctttaaaaacagatatacagggtgtgttgaaggactgggaaccttatctgtcaaagtgtgataatatttttattcgagctcgcaatgtcagtgataaaaaaatttttactgataataccgttctgaacaagggtgatgaaaggataaagagcttcccttttaccacgaacaggcccactgtattagaattgaagaaggcatggtgcgaactttcctacctgaaaatattacctaagcctgaaccattggcagtgaaagaaacagtacaaaagttagaagtgtcgaacaaaaaggacgaatttaaagaaaaacaagaaccgttactggaagaaatccaaacagaagaaataatttctctgctgaagaaaggaagggcaccgttattgatatccttcttaaaaaagaataagcttgatggaaactttcggttaaagcctgagagtaaatattccttaacccctaccatgttacattatgcatcgcagcaagggatgaaacagatggcactgattatgctctcaaatattaaatgcgatccaacgatcaagaacagactaggaaggactgcgtgggatttgaatagaaacgacgacgtgagacacgcgtttcaaattgcaagatacaatcttggagagtctttcactaattgggacgaaactcatatcggtcagccattgagcagagaacaagttgatgaaatcaatgaaaagaaaaaagcaatagagaatgaaaaggcagaaaaactgattaaattggaattagaagccgccaaggaaaaacaaagatttgctaaagatgcagagaggggtccaggcaaaaagttaaccaatattccttcaattcagcaacaaaatttgaattctttgaccgatgaacagagacgcagattgatgagagaacaaagggctagagccgcagaagaaaggatgaaaaagaaatactga

SEQ ID NO: 4744 - protein, 632 aa, Saccharomyces cerevisiae
MNSQKASKMTGSLKKNDLYIFDLSEQLLNSLKLMSFDSTLREVEVEKTSDNDRNKESGDLQIARKKVTSNVMRCSVCQMSFDSRNEQKAHYQTDYHLMNVKRNLRGLDILSVEEFDALISKEHGIKSEDENSGGEQTSSDHEESEEASDRDPDLQTNNYMETIIENDLQKLGFQKDESDAISHINTQSPYIYFKSKYLQKNEVLAIYKSLFNKRSLSNPNEALTFWNSQENPMAISALFMVGGGHFAGAIVSHQRLNVKGNAHKKDETLIEQAVNFLEHKTFHRYTTRRKQGGSQSAMDNAKGKANSAGSALRRYNESALKTDIQGVLKDWEPYLSKCDNIFIRARNVSDKKIFTDNTVLNKGDERIKSFPFTTNRPTVLELKKAWCELSYLKILPKPEPLAVKETVQKLEVSNKKDEFKEKQEPLLEEIQTEEIISLLKKGRAPLLISFLKKNKLDGNFRLKPESKYSLTPTMLHYASQQGMKQMALIMLSNIKCDPTIKNRLGRTAWDLNRNDDVRHAFQIARYNLGESFTNWDETHIGQPLSREQVDEINEKKKAIENEKAEKLIKLELEAAKEKQRFAKDAERGPGKKLTNIPSIQQQNLNSLTDEQRRRLMREQRARAAEERMKKKY

SEQ ID NO: 4745 - DNA, 2004 bp, Glycine max; identical to SEQ ID NO: 1208
  CDS (1)..(2004)

SEQ ID NO: 4746 - protein, 667 aa, Glycine max; identical to SEQ ID NO: 1209

SEQ ID NO: 4747 - DNA, 1983 bp, Coprinopsis cinerea okayama7#130; identical to SEQ ID NO: 1210
  CDS (1)..(1983)

SEQ ID NO: 4748 - protein, 660 aa, Coprinopsis cinerea okayama7#130; identical to SEQ ID NO: 1211

SEQ ID NO: 4749 - DNA, 1971 bp, Magnaporthe grisea 70-15; identical to SEQ ID NO: 1212
  CDS (1)..(1971)

SEQ ID NO: 4750 - protein, 656 aa, Magnaporthe grisea 70-15; identical to SEQ ID NO: 1213

SEQ ID NO: 4751 - DNA, 1971 bp, Magnaporthe grisea 70-15; identical to SEQ ID NO: 1214
  CDS (1)..(1971)

SEQ ID NO: 4752 - protein, 656 aa, Magnaporthe grisea 70-15; identical to SEQ ID NO: 1215

SEQ ID NO: 4753 - DNA, 1953 bp, Candida glabrata CBS 138; identical to SEQ ID NO: 1216
  CDS (1)..(1953)

SEQ ID NO: 4754 - protein, 650 aa, Candida glabrata CBS 138; identical to SEQ ID NO: 1217

SEQ ID NO: 4755 - DNA, 1866 bp, Kluyveromyces lactis NRRL Y-1140; identical to SEQ ID NO: 1218
  CDS (1)..(1866)

SEQ ID NO: 4756 - protein, 621 aa, Kluyveromyces lactis NRRL Y-1140; identical to SEQ ID NO: 1219

SEQ ID NO: 4757 - DNA, 1905 bp, Debaryomyces hansenii CBS767; identical to SEQ ID NO: 1220
  CDS (1)..(1905)

SEQ ID NO: 4758 - protein, 634 aa, Debaryomyces hansenii CBS767; identical to SEQ ID NO: 1221

SEQ ID NO: 4759 - DNA, 1821 bp, Yarrowia lipolytica CLIB122; identical to SEQ ID NO: 1222
  CDS (1)..(1821)

SEQ ID NO: 4760 - protein, 606 aa, Yarrowia lipolytica CLIB122; identical to SEQ ID NO: 1223

SEQ ID NO: 4761 - DNA, 1914 bp, Aspergillus nidulans FGSC A4; identical to SEQ ID NO: 1224
  CDS (1)..(1914)

SEQ ID NO: 4762 - protein, 637 aa, Aspergillus nidulans FGSC A4; identical to SEQ ID NO: 1225

SEQ ID NO: 4763 - DNA, 1614 bp, Candida albicans SC5314; identical to SEQ ID NO: 1226
  CDS (1)..(1614): transl_table=12

SEQ ID NO: 4764 - protein, 537 aa, Candida albicans SC5314; identical to SEQ ID NO: 1227

SEQ ID NO: 4765 - DNA, 1965 bp, Cryptococcus neoformans var. neoformans B-3501A; identical to SEQ ID NO: 1228
  CDS (1)..(1965)

SEQ ID NO: 4766 - protein, 654 aa, Cryptococcus neoformans var. neoformans B-3501A; identical to SEQ ID NO: 1229

SEQ ID NO: 4767 - DNA, 1956 bp, Vitis vinifera; identical to SEQ ID NO: 1230
  CDS (1)..(1956)

SEQ ID NO: 4768 - protein, 651 aa, Vitis vinifera; identical to SEQ ID NO: 1231

SEQ ID NO: 4769 - DNA, 1803 bp, Schizosaccharomyces pombe; identical to SEQ ID NO: 1232
  CDS (1)..(1803)

SEQ ID NO: 4770 - protein, 600 aa, Schizosaccharomyces pombe; identical to SEQ ID NO: 1233

SEQ ID NO: 4771 - DNA, 2001 bp, Oryza sativa; identical to SEQ ID NO: 1234
  CDS (1)..(2001)

SEQ ID NO: 4772 - protein, 666 aa, Oryza sativa; identical to SEQ ID NO: 1235

SEQ ID NO: 4773 - DNA, 2019 bp, Zea mays; identical to SEQ ID NO: 1236
  CDS (1)..(2019)

SEQ ID NO: 4774 - protein, 672 aa, Zea mays; identical to SEQ ID NO: 1237

SEQ ID NO: 4775 - DNA, 26 bp, Artificial sequence
  primer
atgaattcacaaaaggcgagtaaaat

SEQ ID NO: 4776 - DNA, 27 bp, Artificial sequence
  primer
tcagtatttctttttcatcctttcttc

SEQ ID NO: 4777 - protein, 726 aa, Artificial sequence; identical to SEQ ID NO: 1240
  consensus sequence
  Variant (3)..(7): Xaa in position 3 to 7 is any amino acid
  Variant (9)..(10): Xaa in position 9 to 10 is any amino acid
  Variant (12)..(36): Xaa in position 12 to 36 is any amino acid
  Variant (37)..(74): Xaa in position 37 to 74 is any or no amino acid
  Variant (76)..(78): Xaa in position 76 to 78 is any amino acid
  Variant (80)..(80): Xaa in position 80 is any amino acid
  Variant (82)..(83): Xaa in position 82 to 83 is any amino acid
  Variant (85)..(85): Xaa in position 85 is any amino acid
  Variant (87)..(201): Xaa in position 87 to 201 is any amino acid
  Variant (202)..(244): Xaa in position 202 to 244 is any or no amino acid
  Variant (250)..(261): Xaa in position 250 to 261 is any amino acid
  Variant (262)..(286): Xaa in position 262 to 286 is any or no amino acid
  Variant (293)..(294): Xaa in position 293 to 294 is any amino acid
  Variant (296)..(296): Xaa in position 296 is any amino acid
  Variant (298)..(298): Xaa in position 298 is any amino acid
  Variant (300)..(301): Xaa in position 300 to 301 is any amino acid
  Variant (304)..(305): Xaa in position 304 to 305 is any amino acid
  Variant (307)..(311): Xaa in position 307 to 311 is any amino acid
  Variant (313)..(313): Xaa in position 313 is any amino acid
  Variant (317)..(318): Xaa in position 317 to 318 is any amino acid
  Variant (325)..(325): Xaa in position 325 is any amino acid
  Variant (328)..(333): Xaa in position 328 to 333 is any amino acid
  Variant (335)..(351): Xaa in position 335 to 351 is any amino acid
  Variant (352)..(358): Xaa in position 352 to 358 is any or no amino acid
  Variant (360)..(384): Xaa in position 360 to 384 is any amino acid
  Variant (385)..(387): Xaa in position 385 to 387 is any or no amino acid
  Variant (389)..(392): Xaa in position 389 to 392 is any amino acid
  Variant (394)..(394): Xaa in position 394 is any amino acid
  Variant (396)..(397): Xaa in position 396 to 397 is any amino acid
  Variant (399)..(400): Xaa in position 399 to 400 is any amino acid
  Variant (402)..(405): Xaa in position 402 to 405 is any amino acid
  Variant (407)..(472): Xaa in position 407 to 472 is any amino acid
  Variant (473)..(514): Xaa in position 473 to 514 is any or no amino acid
  Variant (516)..(516): Xaa in position 516 is any amino acid
  Variant (519)..(519): Xaa in position 519 is any amino acid
  Variant (521)..(531): Xaa in position 521 to 531 is any amino acid
  Variant (534)..(537): Xaa in position 534 to 537 is any amino acid
  Variant (538)..(538): Xaa in position 538 is any or no amino acid
  Variant (541)..(546): Xaa in position 541 to 546 is any amino acid
  Variant (548)..(548): Xaa in position 548 is any amino acid
  Variant (549)..(577): Xaa in position 549 to 577 is any or no amino acid
  Variant (579)..(581): Xaa in position 579 to 581 is any amino acid
  Variant (583)..(587): Xaa in position 583 to 587 is any amino acid
  Variant (588)..(589): Xaa in position 588 to 589 is any or no amino acid
  Variant (591)..(592): Xaa in position 591 to 592 is any amino acid
  Variant (594)..(605): Xaa in position 594 to 605 is any amino acid
  Variant (606)..(606): Xaa in position 606 is any or no amino acid
  Variant (608)..(619): Xaa in position 608 to 619 is any amino acid
  Variant (620)..(621): Xaa in position 620 to 621 is any or no amino acid
  Variant (623)..(670): Xaa in position 623 to 670 is any amino acid
  Variant (671)..(715): Xaa in position 671 to 715 is any or no amino acid
  Variant (718)..(718): Xaa in position 718 is any amino acid
  Variant (721)..(721): Xaa in position 721 is any amino acid
  Variant (725)..(725): Xaa in position 725 is any amino acid

SEQ ID NO: 4778 - protein, 54 aa, Artificial sequence; identical to SEQ ID NO: 1241
  protein pattern
  Variant (2)..(3): Xaa in position 2 to 3 is any or no amino acid
  Variant (5)..(5): Xaa in position 5 is Phe or Ile
  Variant (9)..(10): Xaa in position 9 to 10 is Thr or Val
  Variant (12)..(12): Xaa in position 12 is any amino acid
  Variant (14)..(14): Xaa in position 14 is Ala or Gln
  Variant (16)..(17): Xaa in position 16 to 17 is any amino acid
  Variant (19)..(19): Xaa in position 19 is Ala, Gly or Ser
  Variant (20)..(21): Xaa in position 20 to 21 is any amino acid
  Variant (23)..(23): Xaa in position 23 is Ala or Asn
  Variant (24)..(24): Xaa in position 24 is Ala, Asn, Ser or Thr
  Variant (25)..(27): Xaa in position 25 to 27 is any amino acid
  Variant (28)..(28): Xaa in position 28 is Ala or Ile
  Variant (29)..(29): Xaa in position 29 is any amino acid
  Variant (33)..(33): Xaa in position 33 is Ala or Ser
  Variant (34)..(34): Xaa in position 34 is any amino acid
  Variant (35)..(35): Xaa in position 35 is Ile or Leu
  Variant (39)..(39): Xaa in position 39 is Gly or Asn
  Variant (41)..(41): Xaa in position 41 is any amino acid
  Variant (44)..(45): Xaa in position 44 to 45 is any amino acid
  Variant (46)..(46): Xaa in position 46 is Asp or Glu
  Variant (47)..(47): Xaa in position 47 is Ile or Val
  Variant (48)..(48): Xaa in position 48 is any amino acid
  Variant (49)..(49): Xaa in position 49 is Ala, Asp, Glu, Gly, Asn or Gln
  Variant (50)..(50): Xaa in position 50 is Leu or Val
  Variant (51)..(51): Xaa in position 51 is Phe, Ile, Leu or Met
  Variant (52)..(53): Xaa in position 52 to 53 is any amino acid

SEQ ID NO: 4779 - protein, 29 aa, Artificial sequence
  protein pattern
  Variant (2)..(2): Xaa in position 2 is any amino acid
  Variant (3)..(4): Xaa in position 3 to 4 is any or no amino acid
  Variant (6)..(7): Xaa in position 6 to 7 is any amino acid
  Variant (8)..(9): Xaa in position 8 to 9 is any or no amino acid
  Variant (11)..(11): Xaa in position 11 is Phe or Leu
  Variant (12)..(12): Xaa in position 12 is Asn, Pro, Ser or Thr
  Variant (13)..(13): Xaa in position 13 is Thr or Val
  Variant (14)..(14): Xaa in position 14 is any amino acid
  Variant (16)..(16): Xaa in position 16 is Ala or Pro
  Variant (17)..(17): Xaa in position 17 is Asn or Thr
  Variant (18)..(19): Xaa in position 18 to 19 is any amino acid
  Variant (21)..(21): Xaa in position 21 is Ala, Leu or Val
  Variant (22)..(22): Xaa in position 22 is any amino acid
  Variant (23)..(23): Xaa in position 23 is Lys or Arg
  Variant (24)..(26): Xaa in position 24 to 26 is any amino acid
  Variant (27)..(27): Xaa in position 27 is Glu or Asn
  Variant (29)..(29): Xaa in position 29 is Ser, Thr or Val
DXXXRXXXXPXXXXRXXXXEXXXXXXXLX

SEQ ID NO: 4780 - protein, 9 aa, Artificial sequence
  protein pattern
  Variant (6)..(6): Xaa in position 6 is Ala or Gly
  Variant (7)..(7): Xaa in position 7 is any amino acid
  Variant (8)..(8): Xaa in position 8 is Ile or Val
  Variant (9)..(9): Xaa in position 9 is Phe, Ile or Val
GGHFAXXXX

SEQ ID NO: 4781 - protein, 12 aa, Artificial sequence
  protein pattern
  Variant (3)..(3): Xaa in position 3 is any amino acid
  Variant (6)..(6): Xaa in position 6 is any amino acid
  Variant (10)..(10): Xaa in position 10 is any amino acid
  Variant (12)..(12): Xaa in position 12 is Phe, Ile, Leu or Met
REXRAXAAEXRX
